United States Patent Application Publication US 2011/0165568 A1 - sequence listing, part 2

SEQ ID NO: 1327 - DNA, 20927 bp, Escherichia coli
  Strain O55:H7
  modified_base (1096)..(1096): a, c, g or t
  modified_base (3235)..(3235): a, c, g or t
  modified_base (4089)..(4089): a, c, g or t
  modified_base (4579)..(4579): a, c, g or t
  modified_base (6653)..(6653): a, c, g or t
  modified_base (6745)..(6745): a, c, g or t
  modified_base (8187)..(8187): a, c, g or t
  modified_base (9767)..(9767): a, c, g or t
  modified_base (11669)..(11670): a, c, g or t
  modified_base (12265)..(12265): a, c, g or t
  modified_base (12992)..(12995): a, c, g or t
  modified_base (15179)..(15179): a, c, g or t
  modified_base (17011)..(17011): a, c, g or t
  modified_base (18365)..(18368): a, c, g or t
  modified_base (19724)..(19724): a, c, g or t
  modified_base (20450)..(20453): a, c, g or t
atttcaggaaattaacggaatcatgttcatacgcgctcccaattctggacgtaagctcctgcttacctgcattgttgcaggcgtaatgattgcgatactggtgagctgccttcagtttttagtggcctggcataagcacgaagtcaaatacgacacactgattaccgacgtacaaaagtatctcgatacctattttgccgacctgaaatccactactgaccggctccagccgctgaccttagatacatgcaagcaagctaaccccgaactgaccgcccgcgcggcgtttagcatgaatgtccgaacgtttgtgctggtgaaagataaaaaaacattctgttcatctgcgaccggtgagatggacattccactcaatgaattgattcctgcgctcgacattaataaaaatgtcgatatggcgatcttacccggcacgccgatggtgccgaacaaacccgcaatcgtcatctggtatcgcaaccctttgctgaaaaatagcggcgtctttgccgctctgaatctcaacctgacgccttctctcttttatagctcacggcaggaagattacgatggcgtcgccctcattattggcaatactgcgctatctaccttttcttcacgtttgatgaacgttaacgaattaaccgacatgccagtccgtgaaactaaaattgcgggcattcctctgaccgttcggctttatgcagatgactggacatggaacgatgtgtggtacgcatttttactgggcggcatgagtggaactgtcgttggcctgctctgctattacctgatgagcgtacgtatgcgccccggcagagaaatcatgaccgccatcaagcgcgaacaattttacgtggcgtatcaaccggtggtggatacacaagctttgcgagtaacgggcctggaagtactgctacgctggcggcatcctgtcgcgggagaaattcccccggatgccttcattaactttgccgaatcgcaaaagatgattgtgccgctgactcagcacctgtttgagttaattgcccgcgatgccgcagaattagaaaaagtgctgccggtaggcgtcaaatttggcattaacattgcgccngaccatctgcacagcgaaagctttaaagcaaatatccagaaactgctcacttccctacccgcacaccatttccagattgtgctggaaattaccgagcgcgatatgctgaaagagcaagaagccacacaactcttcgcctggctgcactcggtcggcgtagaaattgctattgatgacttcggcaccgggcacagcgcgcttatctatcttgagcgttttacgctcgattatctgaaaattgaccgtggatttatcaacgccatcggtacggaaacgatcacttcacccgtacttgacgcggtgctgacgctggcgaaacgcctcaatatgctgacggttgctgagggggtcgaaacgccggaacaggcgcgatggctaagcgaacgcggcgttaatttcatgcaaggctactggattagtcgcccgttaccgctggacgattttgtccgctggctgaagaaaccgtatacgccgcagtggtaaggtgtgcttacgtcccttattattcatagtgaaagcatgccggattgcggctaatgatgagtaaaaggaaatccgttgcagatgattgtgcgcatactgctgctgtttatcgctctgttcacctttggtgcacaggcgcaggctatcaaggaaagctatgcctttgccgtgctgggcgaaccccggtacgcgtttaatttcaaccattttgattatgtgaaccccgccgcgccaaaaggtgggcagataacgttgtcagccctcggtaccttcgataatttcaaccgctatgcactgcgcggcaacccgggcgcacgcaccgagcagctgtacgacacgctatttacgacttccgatgacgaaccaggcagttattacccgctgattgctgaaagcgcacgctatgctgacgattattcctgggtggaggtcgctattaatccgcgcgcccgttttcatgatggttcgcccattactgcccgcgatgtagagtttacttttcaaaaatttatgactgaaggcgtgccgcaatttcgtctggtctacaaaggcaccaccgtcaaagccattgcgccgttaaccgtgcgcattgagttagctaaacccggcaaagaagatatgttgagtctgttttcgctgccggtatttccagaaaagtactggaaggatcacaaacttagcgatccgctcgccacgcctccgcttgccagtggtccgtaccgaattacgtcctggaaaatggggcaaaatattgtctattcccgcgtgaaagattactgggcagcaaacttaccggtaaaccgtggacgctggaatttcgacaccattcgctacgattattacctcgatgataatgtcgcctttgaagcgtttaaagcaggtgcctttgatttgcgtatggaaaacgacgccaaaaactgggccacacgctatagcggtaaaaatttcgataaaaaatacatcatcaaagatgagcaaaagaacgaatcagcccaggatacgcgctggctggcgtttaatatccaacgtccggtattcagcgatcgccgggtccgggaagcaatcaccctcgcctttgactttgaatggatgaacaaggcgttgttttacaatgcctggagtcgcacgaacagttattttcagaataccgaatacgcggccagaaattaccccgacgccgcggagctggtgcttctggcaccaatgaaaaaagatttaccgccagaagtcttcacacaaatctaccagccgccggtatcgaaaggcgatggctacgatcgtgacaacctgttaaaagccgacaaacttctcaacgaagcgggctgggtgctgaaaggtcagcaacgcgttaatgccactacgggtcagccgctcagctttgaattattgcttcctgcaagcagcaatagtcagtgggtattgccgttccagcacagcctgcaacggctgggtatcaacatggacattcgcaaggtggataactcgcaaatcaccaaccgcatgcgcagtcgcgactatgacatgatgccgcgcctatggcgggcgatgccgtggcccagttccgatttacagatttcctggtcatcggaatatatcaattccacttataatgcccccggcgtgcaaagcccggttatcgactcgctgatcaaccanattattgccgcgcagggaaataaagaaaaattactgccgttagggcgagcactggatcgcgtattaacgtggaattattacatgctgccaatgtggtacatggcggaagaccgtctcgcctggtgggataaattctcccaacccgctgtgcgccctgtttacagtctgggtatcgatacctggtggtatgatgttaataaagcggccaaactgccgtcagccagacaacagggagagtagatgggcgcttatctgattcgccgtctgttgctggtgatcccaacgttatgggcgattatcactatcaactttttcatcgtgcaaattgcgcctggcggtccggtcgaccaggccatcgccgccattgagtttggtaatgccggagtattacccggcgcaggcggtgaaggcgttcgcgccagccatgcgcaaacgggcgtcggtaatatcagcgacagtaattaccgtggcggacgcggattagatccagaagtgatcgccgagatcactcatcgctacggtttcgataagccgatccacgaacgttacttcaaaatgctctgggactacatccgctttgattttggcgatagcctgtttcgcagcgcctcggtgctgacgctgattaaagacagactgccggtttccatcaccctcggattgtggagcacgctgattatctatctggtgtcgattccgttaggcattcgcaaagctgtttataatgggagccgctttgacgtctggagtagcgcatttatcatcatcggctacgccattccggcctttttgtttgccatcctgctgattgtcttcttcgcaggcggcagctatttcgacctgttccctctacncgacctggtttccgctaactttgattcgctgccgtggtatcagaaaatcaccgattatctgtggcatatcacgctgccggtgctggcgacggtgattggtggctttgcggcgctgactatgctgacaaaaaactcattccttgatgaagtacgcaagcaatacgtggtgaccgcacgtgcgaaaggggtaagtgaaaaaaatattctctggaaacatgtgttccgcaacgccatgctgctggtgattgccggttttccggcgacgtttatcagcatgttttttaccggctcgctgctgattgaggtgatgttttcactcaatggtcttggcttactgggctacgaagcgaccgtctcgcgcgattatcctgtaatgtttggtaccttgtatattttcaccctgattggcctgctgctgaatattgtcagtgatatcagctatacgctggtcgatccgcgtatagattttgagggacgttaatgtcgcgantcaaccccgtcaatcaggcccgttgggcgcgttttcgccataaccgtcgcggctactggtcgttatggattttcctcgttttgtttggtttgagtttgtgttctgaacttatcgccaacgataaaccgttgctggtgcgttatgacggcagttggtatttcccgttgttgaaaaactacagcgaaagcgattttggcggcccgctggcaagtcaggctgattatcaggacccgtggctgaaacaacggctggaaaataatggctgggtactgtgggcaccgattcgctttggtgctaccagtatcaactttgctaccgataagcccttcccttctcccccctcccggcaaaactggctgggaacggatgccaacggcggcgatgtgctggcacgtattctctatggcacgcggatctcggttctgtttggcctgatgctgactctctgttccagcgtgatgggcgtgctggcgggggcgctacaaggctattacggcggtaaggtcgatctctgggggcagcgctttattgaagtatggtcggggatgccaacgctgtttttgattattctgctttccagcgttgtgcaacctaacttctggtggctgctggcaattactgtcttatttggctggatgagtctggtcggcgtggtgcgggcggagtttttacgtacccgcaatttcgactacatccgcgcggcacaggcgcttggcgtcagcgatcgcagtattattctgcgtcatatgttgccgaatgcaatggtcgctaccctcacctttttaccgtttattttatgtagttcgatcaccaccctgacctcactcgatttcctcggcttcggtctgccgctcggttcaccgtcactcggtgaactgctgttacaagggaaaaataaccttcaggctccgtggcttgggatcaccgccttcttgtcggtggcgatattattgtctttgctgatctttattggtgaagccgtccgcgacgcatttgatcctaataaggcggtgtagcatgacgcaaactctgttagcgattgaagatttgtcggtgggttttcgccatcagcaaaccgtacgtacagtagtcaatgatgtttcactacagattgaggctggcgaaacgctggcgctggtgggtgagtcaggttcaggcaaaagcgttaccgcgctgtcaattttacgcctgctcccttccccgccggttgaatatctctccggcgatattcgttttcatggcgaatcgctgcttcatgccagcgaccaaacgttgcgcggtgtacgcggtaataagatcgccatgatttttcaagagccgatggtgtcgttaaatccattgcataccctggaaaaacagctttatgaagtgctttcactccaccgcgggatgcgtcgggaagcggctcgtggcgaaattcttaactgccttgatcgcgttggtatccgccaggcggcaaaacggctgacagattatccgcatcagctctccggcggcgaacgccagcgggtgatgattgcgatggcgctgttaacgcgaccggaattattaattgccgatgaaccgaccaccgcactggacgtctctgtccaggcgcagattttacagctgttgcgcgaactgcaaggcgagttgaatatgggcatgctgtttattactcataacctcagcattgtcagaaaactggcccaccgcgtggcggtaatgcaaaacggtcgctgtgtcgagcaaaattacgccgctacgctatttgcctcacccactcatccttacacacaaaagctactcaacagtgaaccgtcaggcgatccagtgccgttgccagaacctgcctcaacgttgctggatgttgaacagcttcaggttgccttccccattcgcaaagggattttgaagcgcattgtggatcataatgtggtggtgaaaaacatcagttttacgctacgagcgggtgaaacactgggtttagtgggcgagtccggttccgggaaaagcacgacgggactggcgctgctgcgactgattaattctcagggcagcatcatctttgacggtcagccactgcaaaatttanatcgccgccagctgttacctattcgtcatcgcattcaggtggtatttcaggatccaaactcctcgctcaacccacgactcaacgttttgcanattattgaggaaggcttacgggttcaccagccgacgctttctgccgcacaacgcgaacaacaagtgatagacgtgatgcatgaagtgggattagatcctgaaacacgccaccgttatccggcggagttctctggtggtcagcgacaacgtattgcgattgccagggcattaattcttaagccctcgctgatcatacttgatgaaccgacatcatcactcgacaaaacggtacaggcgcaaatattgacgctattgaaatcattgcaacaaaagcatcaactggcctatttgtttatcagccacgatttgcacgttgtccgcgcgttatgtcatcaggttatcgtactgcgacaaggggaagtagtggaacaaggaccgtgcgcgcgcgtgtttgccacaccgcagcaggagtatacgcgtcagctactggcgttgagctgacgcttaaaaaggattgtagtttgaaaagggttcggcaattgccacaccaaaatttttcaatcggcatgttgcagcaaactcgtcctggcgatttacaaacaggcacggctcaccttcacactccagcaccgaacatggaacttcgatgtcgcttaacgcctggcttagtttatacatcaccgaccatgcattatcaccatccgggctaagcaatttaagcgccaccaggctgttgtcaccgcacggtccattttgcggaatcggttcaaccttcgaacctgcgaaaccagcagaccagcgatagttctgcggcagtcgatggacgattgagagttgtaatgaagtcacttattttccccggaagcacatttacttcacaatttgtttacatcaattttaacacatcatcaacaatccgtctttatacagatcgtaaagattgatgcctcgcctgcgtggcctctatggctctgatttaagtaatatctgcgggcgtggtcacgtttgcggggctatatgtacccgtttctgcgatctaactcaacctttttaactacaatgatgtgactttttacataaattgattttacataaaataaacatatatcgggggaatgatagatttgtggttgacatgcatcaacaaaggaagccttttagcttcctcgttgtgcaatagatcaccgttttttcggccgactggcgtacagacagaagagaatggagctggttgcgcagaatgcaattgaccaaatcatcggccatgcagagttaaaggtcgcaagagaaagcaatgcgccaacaattgcccctatgccaaaacggaaggttcctgccagcgaagatgccgttcccgccatatggggaaactcatcaagaatgaccgccatcgcattggatgacaccatcgacacgcagcccacaaacgccgcaacgccaaccaccagcgaccaaaatcccagacccagcagcgcactgatgaccatccacgctgccataanaaattgtatccacaaccccgagcggaacatatttaacgcgccaatacggcggacgaagcggctattaaagatggtcatcacgaacaggaaaacaatgtttagtgcaaagtaataaccaaagttttccggcgcgacgtggttaatttcaatgtagacaaacggtccggcgcttaagaacgagaacatcccggcaaagctgaaaccactggccagcatataactcaggacacgcttatgacggaacagcgccgcaaagttaccaatagtggtacgaatgtgaaaaggctggcgacgctccggtggtaaggtttctttgatcagaaagaagatcattgccgaagccagaatcgccgccacggcgaggatccagaagatgtaatgccagctcagccacaccagcacccagccgccaactatcggtgccatcagcggtgcaatggtcgtcaccagcatgacaaacgacatcatccgcgagaactcttctttcgggtagatatcacgcatcaaagcgttgataaccacgctggccgcagccgccgccagcccgtggaagaaacgcatcacaatcagctgatcgatggtttgtgccaacgcacacgccaccgcggcggcggcaaacaccagcgtaccgccaagaaccaccggcttacgcccgaagctgtctgccatcggcccgtagattaactgccccaacgcaaagcccagaatataagtactgagggtcatctgcgtactgcccgccggtacgccaaactgcgctgaaattaccggtagcgcgggcagatacatatcaatcgacagcggcatcaacatggccagcaggccaaggataaaaacaatagcaaacgacgaatgctgtcgggtggtcacaacgggctcctgaaagtcattgaaaagttagacgacgctggcaatttcttcttcagttaacggacgatattcaccgggggctaaatcagcatccagcgtaatgccgccaatacgttcacgatgcagctcaaccacatggttacccacggcggcgaacatgcgtttcacctgatgataacgcccttcgctgatggtcagacgaacctgcgttggggtaatcacttcaagcaccgctggcttagtgagatctttttcgttatgcagctgcacgcctttagcaaattgctctgccgtatcgtcagctacgggtgattccagcgtcaccagataggtcttctcgcaatgatggcgcggagaagtaatgcggtgcgaccactgaccatcatctgtcattagtaccagaccggtggtatcgatatccagccgccctgcggcgtgcagtttccacgccactggttcatctagaaaatagagcaccgttgggtgatcagggtcgtccgtggagcaaacatagccctgaggcttattgagcatgaagtaacgtggaccgtgttgctgcgccagcgggttgccatcgtaagcgacatcatgttcaggaagcagtttgaacgctgcattacggacgatttcgccatcgacggtgacacgattgccgcggatttcacgcccggcaatagcacggctaacgccgagttgctgtgcgataaatntatcaagtcgcatgtgtgtgattttgcctgtaaaaacggaggtcgggcattgacccgaaaatctgaactgttgtctgcccagtatagcggtctaataacttccctcaagggaaaaagaaccgtggcatactattagcagaataatctacctacgcgagaccatgatttttacactccgcccatatcagcaagaagccgtggatgccacgctcaaccattttcgtcgtcataaaacccctgccgttatcgtgctgcccaccggtgcaggtaaaagcctggtgatagcggaacttgcgcggctggctcgtggtcgcgtgctggtgctggcacacgttaaagaactggtggcgcaaaaccatgcaaagtatcaggcgctggggctggaagccgatatttttgccgccgggctaaagcgcaaagagagccacggtaaagtggtatttggcagcgtgcagtcggtcgcccgtaatcttgatgcctttcagggtgaattttcgctgttgattgtcgatgaatgtcaccgtattggtgacgatgaagagagccagtatcagcaaatcctcactcacctgacaaaagtgaatccccacttacgcctgctggggctgactgccacgccttttcgactgggcaaaggctggatctaccagttccattatcacggcatggtacgcggcgatgagaaagcccttttccgtgactgcatttatgaactgccgctgcgttatatgatgaaacacggctatctgacgccgccagaacgactggatatgccagtagtgcaatacgatttcagccgcttgcaggcacagagtaacgggctattcagcgaagccgatctcaaccgcgagctaaaaaaacaacaacgtattaccccgcacatcatcagccagattatggagtttgctgcaacgcgcaaaggggtgatgattttcgccgccaccgttgaacacgcaaaagagattgtgggattactacccgccgaagatgctgcactgattactggcgacacccccggcgctgagcgcgatgtgttaattgaagattttaaagcccagcgttttcgctatctggtcaacgtcgcggtactgaccaccggatttgacgccccgcacgtcgatcttatcgccattctgcgccctaccgaatcagtgagtctttaccaacaaattgtcgggcgcggtctgcgtctcgctcctggcaagactgattgcttaattcttgattatgcgggtaatcctcacgatctctacgcgccggaagttggtacaccgaaaggcaaaagtgacaacgttccggtacaggttttctgccctgcctgcggttttgccaacaccttttgggggaaaacgaccgccgacgggacattgattgaacactttggtcgccgctgtcagggatggtttgaagatgacgacggtcatcgcgaacagtgtgacttccgtttccgttttaaaaattgcccgcaatgtaacgcagaaaatgatattgccgctcgccgctgccgcgaatgtgacacggtactggttgatccggatgatatgttaaaagcggcgctacgactgaaagatgcgctggtattacgctgtagcggcatgtctttgcagcatgggcacgacgagaaaggcgaatggttgaaaatcacctattacgatgaagacggcgcggatgtgagtgagcgtttccgtctgcaaacgcccgcccagcgaactgccttcgagcagctttttatccgcccgcatacgcgcacaccgggcatccctctgcgctggatcaccgccgccgatatcctcgcccagcaagccttattgcgacacccggattttgtcgttgcccgcatgaaaggtcagtactggcaagtgcgtgaaaaagtgttcgattacgaaggtcgttttcgtcggnngcacgaattacgcggttaatgatagttttgattgatgtataaggcgattgagtatagaatctcgcccgcttttgcatacgcaaagcagatcacttacctgttgctgggtcgcctgtagcaggattaatttaagagagaaagaaatgtttactatcaacgcagaagtacgtaaagagcagggtaagggtgcgagccgccgcctgcgtgccgctaacaagttcccggcaatcatctacggtggcaaagaagcaccgctggctatcgagctggatcacgacaaagtcatgaacatgcaagctaaagctgaattctacagcgaagttctgaccatcgttgttgacggtaaagaaatcaaagttaaagctcaggacgtacagcgtcacccgtacaaaccgaagctgcagcacatcgacttcgttcgcgcttaattgctgaataagttgtaaaaaaccccgctccggcggggttttttgtatctgcagattatgcctgattacgatattgctattttttgcaggccagataaggcgttcacgccgcatctggcattcataacacaaaaccgattaattgccgccggacgtccggcgctgcnattgatcgcgcaaattcggcggcgtgcctttaatagtcagggtatcggtcgccggatcccagaaaatccgttcgcccaacagcatcgcatcaaaattaatagtcaagccaccgccgctaccggcaaacttcgtcaactgacgcagtgtgctacggtctgccgggaagctctcttccagttcgtagcctttttcagccgcaaactccgtgaagctcacttcgctgacgcctgccagctctttcgacagcgattccagttcgatctcttcgcctgcctgcagctgctcattacagtagctataaacctgctggcgcacgttctgtcgctctgctttatccagttgtgcttcggcagtgaaatcatcaaccgcttgcaacagcccacggttttgcgctttcgcgttcaatccttcgctggccccgaggaaatccataaagaaatccgccactttgcgccctactcgccctttcaggaaagtgagatagcgggtcgactctggattggtttcccattcggttaaatcgatacgcgcaacaatatccgcatgattgatatcaagataatgggttgggttgatgtcgagattttcgttaacgcgcatactgctcaggttgctcaggactgccaccagcagatactccaccgccagataacggtagtggcaaaacagcacgaatccaccgtcagcaaaaggatatttcgctaattcgtcacgcaggcgaccggnnnncgcgcggctaaatgccagaaagtcctcttcaccctgacgctgtaagcgcagcgtctgcgccagttcactctcttcgctaaacaagccgtaagctttatttttggcgctatagacccgatgcagttctgctaccatctcaacgacggtttctgtcggttccagcaatgaatcgcgcaacaccagctcaaggttctgctcatcacgcttgataagctggtgcagagcaatctggttgatatccagactcatgataaactctcctttaagaccgggcggtattcaaccaccgccggttaagcgacgcaataaaagatggcggtcattttacagaaggcggcgtaacgagaatgatttaacgcataaaaaagcagaaaaaaaaccgttgctacggtaatatgttgccctttcatcaactaactgatttcgatttatgccacaaatttcccgctacagtgatgaacaggttgaacaattgctcgcagagctgctcaacgtactggaaaaacataaggctccgaccgacctttccctgatggtgttaggcaacatggtcactaaccttatcaacaccagcattgccccggcccaacgccaggcaattgccaactcttttgcccgcgccttacagtcctctatcaacgaagacaaagcgcactaagggaaacagataacaggttatggtaactcatcgtcagcgctaccgtgaaaaagtctcccagatggtcagttgggggcactggtttgcactgttcaatattctgctttcgctcgtcattggcagccgttacctgtttatcgccgactggccgaccacgcttgctggtcgcatttattcctacgtaagcattatcggccatttcagcttcctggtgttcgccacctacttgctgattctcttcccgctgacctttatcgtcggctcccagaggctgatgaggtttttgtccgtcattctggcaacggcgggaatgacgctattactgatcgatagcgaagtctttactcgtttccatctccatcttaatcccatcgtctggcaactggttattaacccagacgaaaatgagatggcgcgcgactggcagctgatgttcatcagcgtgccggttattttattgcttgaactggtgtttgcgacgtggagctggcaaaagctgcgcagcctgacgcgtcgtcggcgcttcgcgcgtccgctggccgcattcttatttatcgcctttatcgcctcgcatgtggtgtatatctgggccgatgccaacttctatcgccctatcaccatgcagcgcgctaacctgccgctttcgtacccgatgacggcgcgacgttttcttgagaagcatggcctgcttgatgcgcaggagtatcaacgccgtcttattgagcaaggtaatccagacgccgtttccgttcagtatccgttaagcgaactgcgctatcgcgatatgggcaccgggcagaatgtcttgttgattactgtcgatggcctgaactactcacgcttcgagaagcagatgcctgcgctggcaggttttgctgagcaaaatatttcgttcacgcgccatatgagctccggcaacactacagacaacggcatctttggcctgttctatggcatctcgccgagctatatggacggcattctgtcgacccgtacacctgcggcattaattactgcgcttaatcagcaaggctatcagctggggttattctcatcagatggctttaccagcccgctgtatcgccaggcattgttgtcagatttctcgatgccgagcgtacgcacccaatccgacgagcagaccgccacgcagtggatcaactggctgggacgctacgcacaagaagataaccgctggttctcgtgggtctctttcaatggtactaacattgacgacagcaatcagcaggcatttgcacggaaatatagccgggcggcaggcaatgtcgatgaccagatcaaccgcgtgctcaatgcactgcgtgattctggcaaactggacaatacggtggtgattatcactgccggtcggggtattccactgagcgaagaggaagaaacctttgactggtcccacggtcatctgcaggtgccattagtgattcactggccaggcacgccggcgcagcgtattaatgcgctgactgatcataccgatctgatgacgacgctgatgcaacgcctgntacatgtcagcacacctgccagcgaatattcgcaaggtcaggatttgttcaaccctcaacgccgtcattactgggttaccgcagcggataacgatacgctggcaattaccaccccgaaaaagacgctggtgctgaacaataacggtaaataccgcacttacaacttacgtggtgaaagagtgaaagatgaaaaaccacagttaagtttgttattgcaagtactgacagacgagaagcgttttatcgctaactgattaattataaatcagttagcgaaatatcttacttgcaatcggtgtggaaaacggtagtattaacagccacgagtcggcacgtagcgcagcctggtagcgcaccgtcatggggtgtcgggggtcggaggttcaaatcctctcgtgccgaccaaaaatcccaaaaaaaccaaccgtaaaggttggtttttttatatctgcatttaattcgataaacagaccgcgacacatcacggcctgtttattgtctgttatcagaacgtccagaccacacccgcctgggtattccacggcgattctacccctgcgccattgccatagctgactgacaaatgaccgcttaacgtcggggtaaacgatgaccttatcccagcctgataaacgccacgggttccagccacatcattattaaatttgccatcgtcattaactttcacctggttagaatcggcgtattcctgacgcacggcggctttcagccagggttccagcgtcgtaccgttttgcaggtccatgtgatagcttaccgccgttcccgcttcagcgcgtaatatccgggtatttcccacatccgcgcgcatgccgtttgataacgtgtagtcctgaccatctgtggtaaagccggtaaaggccagatagggtctaacactccacaatccgtcaacccaacggaacccgctctcgacatgagcacccgcgccgttactattgtaatcgccaaacgctgttgccccattactcatcttgccatggatggtgttggcaaaacggtcaactttcaccactccatcaacataggcaccgttctgatgctcccaaccggcataagcccccagggtatagctatcgacattgcctttgccgccgcgatcaaaaccaatatcagaatgagagtaaccaaagaacaagccgcgaattgtgctgctttcttcacgggagaaacggctatcgataccgagcgtcaggcccgtcaatgtttgctcaaaaccagctcccgcatcagtggtcacgttgttgcgggtgttaattgccgaactccacatcgccgtatcgtaactaacgccttttacgctaccaagacgctcacgcacggtgtccagttctgcatcaaataccagcggttgtgcggccgccatattcagcacatcagtggttgaaggggtaatttgcgcgcgattctctgccagactccagctatggttaccattatccagcaaggtatattcatacgtaccgatatcaacaacgcctccggcattgcccaacgtaaatgcagcatcaccgccgcccgttgttaccagtgtaaggctatctcctgctgccgggctggcaccggtgtccgtcacgaatattttgaaatcacctgttgcctgaccggtgacgttgagctgatcgctctgatgattcgccatatcggtacgcatataaaaattgccgtttcccgacagggtattggtggtcaacgtagtgaaattttccgcacttgccgtcacagatgaacgagtcactggctcatccatcataatcacatttgcgccagacatcgcaaggttagctaagttaaggcgggtgttttggttngtcgtagtgatatcggcaatgatggtccatgcgctattttcgagcgaaacatccgctttgctggtatccacggcaccatgcgttcttaaagaagcgccctcagaaaccactaccttacccaccaacattgcgggtgcataatttatttgcggcttcataacctcaagaatgccatcatttcctctgactgacacgttaaccattgtgccagcccagacgttagcgcggccattgttgataaccatattttcagagatggctttagaggaatacgttatacttccattctgatctgatcgaccgagatcatataccgcatttgcctgcactctcgtaccagtatcctttcccagcgattgcatagtggcatgctcatcgaggatagtgtcaatggcctgcgagtcctccataacaataagcccggaaccatcatccagttcataattttttgacacaccatcttttatactaaattggcctttactgtttgtaccactcacttccagcgcattcgttgagacaattaattttccgcctgcttttttatcaacgccagttgcagtcccgccatccataacctccagtaagccgccactatctacagtagtattataagcgaagtcattttcttcaactcgcaaacttccgccgttttccaacagcatattgttagcaataccattcttgatttcgaactgaccgagacggtttgttccgaatacctccatgacccgcgtgcttgctttaatagcaccgcctgctttctgatctaccgcaatcgctaatcccccctctttaacctccagtaatcctcccttttcgatagcggcaaggacggtaatcccatctttttcaacgattaagcgcccgcctttaatcgtgggatcattcgctgcgccataaacctgtagcacaccattattgagcgtagtctggtttgccgcgccacccatttgaacaatttgataaccatcatttaatactgagtattctgcggtgccattcatttcaatgtactgatacccgccgttaatttcagtattactacttataccaaattctttaatatgctgttctccgccaggattgattttcgtattattggcggtcccataaaccagctggatatctttttccaggacaacaccatcaactgtctcaccatactcaactgttgatgccaatgctatgggtgaatataacgctgtagctaccagaacagatattgcggaacgacaaagagaaacagaaccagattgatgcattgagctttcatcctatgaaattaattgcagttaaaagcattgggtacagaaaatacccatagctccatacccggagtcagtttttaaannnngtttaaagaaatgcacaagtattgtgattgattttttagttgtttttcttgatgagaagctgatgcaaaattccgtctttataatgaaaatgatgccaaagcgaacgacaaggttgtagttttcgctacatgtccatacataaaatggggtaacattcacgcgcctggtagcgttaccaacgctacgctcaaacataatgattctaataaaacctcaggagactactatgcctgaagcaacgccttttcaggtgatgattgtggatgatcatccacttatgcgacgcggtgttcgtcagttactggagcttgatcctggctttgaagtggtcgccgaagcgggcgacggcgcgagtgctatcgatctggcgaatagactggatatcgacgtgatcttgctggatctcaatatgaaaggtatgagtggcctggataccctcaatgccttgcgcagggatggcgttaccgcgcaaattattatcctgaccgtatcagatgcctccagcgatgtctttgcactgatagacgcaggcgcagacggttatctgttgaaagacagcgacccggaagtgttgctggaagcgattcgtgccggagcgaaaggcagcaaagtctttagcgaacgcgtcaatcagtacttacatgaacgtgaaatgtttggcgcggaagaagatcccttcagcgtgctgacggagcgcgagctggatgttctgcacgagctggcacaggggctgtcaaataaacagattgcctcggtgttgaatatttccgagcagacagtaaaagtacatattcgcaatctactgcgcaaactcaatgtccgctcacgcgtggcagccaccattctgttcctgcaacaacgcggggcacaataaaaatagcccgatggcatcaccatcgggcctctttttatttactctcctgcggcgacaaatgttgcatcgcctgcgcgatactacgttcaatcaccgcacggcgagtatcgttggcaggtaagagtttcaacatcatctcccacgcggcaacggcttcgccaaatcgctgctgctcaaaggcattaaacgcatacatgcttaacacacgaatattgctatggtccgttctcaccaactggcgcagcagttcgccgccgaggcggttgtcgttgggatcagatgaacgtgtcaacgcttcagcataacccagtgtggcatcgctgtttttcggatcgaggcgatacgcagtagcgtatgcatcggtggcgatactggcgttacccagcgccatgccaacgcgacccaacataatccaaccttctatatctcccggatttttttgcagttgagtacgcatccccagcgcaaggcgcgacatctnttcttcgttgagcggatcggctttcggatccagcgccctgtccagcaacgccggagcctgtgccgtggcctgctgccagattttcacctgctgataattgccagtctggtagtagctgacgccagccacaattaacgccaccacaatacccggcagataaacaacatatccggcacgcttaccttccggcacgctttgttcaggaaacgcttccggtaccacgcgtacccgacgccgcgaacgggcgtatatgacccaaccgccaataccaatagccactaccggaagcacccacagcagcacggtcagcggcgttaacggcggatcgtaagtgacgaagttgccgtaacgcgccaccatataatcgacaatctctttcttacttttgccttcctgcatcagttcatacactttctggcgcaggtcggtggcaatcatcgagttggaatcggcaatgctgttattctggcatttcgggcagcgcagttcttcagtgagctgacggaactgttgttcctgtgcttcatctttaaactgcaacacgtcgatggtcgccagcgctgagccggagatcatcagcatcagcacgcccaataaaaacctcattgtgcggcctccttactgtatttctcccacagcggcttgatctcttcttcccagacgcgaggattgagatcgcccgcatggcgatagcgaatgatgccgttgccgtcaataagaaacgtnnnnggcgcgccatagacaccgagatccagccctaacatgccatcgccatcaaaaaggcttagcgcgtaaggattgcccagctctttcagccagctgattgccttctggcgatcgtctttatagttcatgccgaccacgcggatgccctgcgcagaaagctgattcagatattgatgttccgcacggcaggtcggacaccaggtcgcccagacgttaagcagcactggtttgccctgagtcagcacatccgcctgataaaactgccccggattgtccagtgattcgagacgaaacttcggcacaggcttgccaatgagcgccgattccagattggtcggatcatccccttcggcattacgcgccagctgccacagcagcgccgcggcaatcgccaggaagataatcaacggaattaacaatactttgcgcttcatacagcctccggcgcagttttttgcgggctcacgcgcttacgat

SEQ ID NO: 1328 - DNA, 7624 bp, Escherichia coli
  Strain O55:H7
  modified_base (2516)..(2516): a, c, g or t
  modified_base (2773)..(2773): a, c, g or t
  modified_base (3727)..(3727): a, c, g or t
  modified_base (4902)..(4902): a, c, g or t
  modified_base (5365)..(5365): a, c, g or t
  modified_base (5414)..(5414): a, c, g or t
  modified_base (6151)..(6151): a, c, g or t
atcaaacagacacagcagtccgcccaacgccatcatcagcccgcccgcccaaatccagcgaacaaatggtttgtagtaaagacgcacagcccacgcgccgttttccagctcttcaccgagcgcggcgtacaggtcacgcgtgatgccgccgtcaattgccgcttcggtcatcatcgacccggcagtgttgtaataacgtttttccgcatacagcaccgtttccggtttaccctctcgcgttacgccgatagtcgccacaccgccacgccagttcgggccagtcacctctttgacatcacggaaggtgaagcgatattcatgaatatcgacgctatcgccggacttcatgcgcacatcacgctcaacgctatagttctggctaaaggcaatgccaacaattgtcactgccagccccaggtgagccgccaccatcccccaataactgaaggtggttttcgtgccgcgtgaaatacgtagcgcagcttccgcaattgccagcaccgcaatccagcaggccattgccaggccgagcaccgtcatcgccacaactttgctttcgaacagccacggcaacagcagagacagcaccagcgtagagatgaaggcgataatcaataaattgcggattttacgtgggcgatcgcgcccccagcgcaccagaggaccgacacccagcagtagcgcaaacggcaccatcagccaggtaaacatggtgttgaagaacggttcgccaatcgaaatactgcccagtcccagttgcttgtgcaccagcggcagcagcgtccccagcaacaccaccagcatcgcggcgaccagcaaaacgttgttcgctaacagcaaagattcccgcgaccacagcgcattgtttacgcgtgagcgaactttgtgtccacgcgcggcaaacagcagcagcgaaccgccaatcaccagcaccataaaggcgaggataaacataccgcgcgccggatcagacgcaaacgcgtgtaccgataccagcacgccggaacgcacgaggaaagtccccaacagacacaacgagaaggcactgattgccagcagtaatgtccacgctttgaagctggcgcgttgttcagtgaccgccagtgagtgcatcagcgcagtccccaccagccacggcataaacgatgcgttttctaccggatcccagaaccaccagccaccccagccgagttcgtaataggcccatgcggaaccgagcacgatgccgagcgtcaggaagatccacgctgccagcgtccacggacgagtaaaacgcgcataagtgctgtccagacgcccgctcagcaaagaagcaatggcaaaagcaaacgccaccgagaaacccacgtaccccatataaagcagaggcggatggaagatcagccccggatcctgtaacagcgggttaagatcgcgcccttcaatcgggaagttcggcagcgtgcgtgagaatgggttagaggtaaagagaatgaacagcaaaaagccgacactgaccatccccattatcgccagtacgcgggccacaatatccagcggaatacgctgactaaaaatcgccaccgcaaaggtccagccgctcatcagcagcacccacagcagcagtgagccttcatgtgcgccccaggtagccgccacgcgataccacaccggaagctgggtattggagttgctggcaacataggtgacggtaaagtcgttgaccacgaaagcattgaccagcaccagaaatgcgccagccacagacataaacagcagccaggcaaacaatcgggaagacgccatcatgcgcgcatctccgcgcgccacgccccatagcggatacacggacagcagcagcgcaattcccagcgccaggcacagcagcccgttaccaatttccggcatcatgatgctgggtccttataaacactcgccgggcgacggtggttagcttccatcgctttctcaacttctggcggcgtgtagttttcatcatgtttcgccagcacttcttttgcgaggatatgattgcctttttccagctcgccctgcaccacaacgccctgcccttcacggaacagatccggcaaaatgccttcgtaagagacatccactgagccttcagcgtcgtaaatggtgaaggtcactttcagcgaattgggatcgcgctgcacactacccggcatcaccatcccgccaacgcgcagacgctgaccgacttccggcatctgctgagtttcacgcttgccgtagagaatttcccccggcgtataaaagagatcgatattcgagcgcagcgcatatagcaccagaccgatagtcagcgccagccctgccaacacggcacaggcaatccacaagcggtttttacggcgaatattcatgcagcctcctgctgttgcgcagcacgtaaacgcgcctcacgcgcccgctgttgcgccacaccacgcagaattgcgcgatgctgcatcaccgagtgcacgaccaaaaccaccagcggaataacggtcatcaccaccgccagccagacaaanaaggcgtaaccgcccattgcgaaaaattcattccaggaagcaaatgcaggggtcatttacggcctcttttcagtatcagttcactcacccacggacggcgtttttccatcagcaaaatcaaattacgcatccgcatcagcgtcagcgtggcagagaggagcaggaagccaaaaatcgaccagcgcagcggcgaacgcatcgccggatcgatactttgctgcatccgcgttgatccctgatgcagggtgttccaccantccacggagtaatgaataatcggcagattcaccacgccaatcagcaccaggatacctgccgcacggcccgccagacggcggtcgtcgaaggcgtgccacagggcaatcacacccacatacaaaaacagcagcaccagttcagaagtcagacgtgcatcccatacccaccaggtgccccacatcggttttccccatgcagagccggtaaccagggcaataaaggtaaacacggcaccaatgggggccatcgccgccaccgccaggttggccattttcatctgccagacaaggccaataaacgccgccaccgccattgatgcataaatgcccatcgaccagatcgccgcaggcacatgcaggtagataatgcggtagctatttccctgctgataatcagccggagcaaagccgaatccccagatccagccgacggtaagcacgactacactggcaattgccagccacggtataaaccagccacagatttgatacagccgtggtgggatcgccagttgatgcagtgttttccacatagtttcgataccagactcgaacaaaaatcagtaatccagcgttattgaatgctgattcgtaacgctgccgccgtcgcaaaaggacttaatgtcgcggtgcctgccagcaacgcgcctaaaattgccagatacccgtcaacgggcaaatgcatagaagccgcgtccatcgcggcggtggcaaagatgagtaatgggatagtcagcggtaacaccagtatgctgagcagcacaccaccgcgcttaagtcccactgtcagcgccacgcccggtgcaccgagaaagccaagcgtaggcgttcccagcagtagcgttaacgccatcacttgccagccataaacatccattcccagtagcattgctaccagtggcgaaaggatgagtaacggcagaccggttaccatccagtgcgccatcaccttcnccagcacaacggcgggcaagggtaacggcaacaacatcaattgttcaagactgccgtcctgcaaatcgtcacggaacagtcgttccagcgccagcaaggatgaaagcagcgcggcaacccagataatgcccggtgcaatacgtgccagcagttgcggctccggaccgatactgagcggaaaaagggtaattacaatcaggaagaaccacagcgggttggcgatttcagcgctatggcgaaacgctacgcgcagctcaagacggaaaatgcgccagaacatcatacggccctcgtttgcgtcagtgaaatgcggcgaattttactttcagcaacgttgagcggctggtgggtagtgagaatcacaatccccccctgctctgtatgctgcgccatacgctgggtcagacgatcgacgccgttaacgtcaatcgcggtaaaaggctcgtcgaggatccataacgtggcacgggtcagccacagacgcgctaaagcgacgcggcgttgttgcccggcagaaagttgatttaccggaatatcttcgaatccggcaagcccggcctgcgccagggcttccagacattgtgcggtatcgccatcgcgatgataaaagtgcagattttctaacgccgtcagccgggttttgatccccggctgatggcctatccataacaggttttgatggtagctgtcgcgtacctgatgcaagggctgcccttgccagagaacctcgcctgcgtcagggcgagacaaccccgtcagcaaacggagaagcgttgtcttccccgcgccgttgctaccggtgatttgtacccactctcctgcgttcagcgtaaatgacaagccactaaataaggttcgttcatcccgctcacaaagtaactctctgacttcaagcatacccacgcaataaccctgttaaaaacctggctcgacttcacgcatatcgggcagcttgtgcgctatccctttatggcaatcaatacaggtttgcccatctttcaccgcctggtcatgcatcttcgcggcaaccgatttctgggcggttgtatccatatactcgaagttgtgacagttacggcactcctgcgagttattgtccttcatgcgccgccactcattctgtgccatcgtcagacgatgagcttcaaatttctgcggcgtgtcaataacgccanaaattttaccatacagctctttacttgctttgagcttgcgtatcatcttcggcacaaactcgtgcggaacgtgacaatccggacaggtcgcacggacgccgctacggttgttgtagtgcacggaatccatgtattcctgatacaccgtgttacgcatttcgtggcagctaatgcagaactcttcggtattggctttttccatcccagtgttaaagccgccccagaagacgatgccgccgacaaaaccgatcaacagcagcgtccccagcgccagacggctgggggtacgccaccatttccacaggcgcttaatcagaccaggcttacggtcagaatttcccataataacctcttatttcccgtaaccttttgatggggtaaaggtattccccacgattggcgcggtatcggcctgcggtacgtgacattgcagacagaaataacgacgcggagccacttccgngcccactttgccgtcgctgtccataaagtgagtaggactgatacgcggngcgccagtggtgcgatagctttcgacaccgtggcactgcaagcagcggttggtattggtcgttacctgataaccttcaacgctatgcgggatcattggcggctgattcacatagttcagcggcatccgatcctgctcttttggcatccgaatggccccttcctgcgtcccggatacttccggcgactggctaaaatcgacgccattagccgcccaaaccgcgccgcttaccaccagggccagcatcgccgtccattgacacagcgctttcttcaggtcatggcttttcatgatttcgctcccgaactccatcgtgtagttattgtaaatacatcctcagaacagacatccacgcagcgaccgcacgtcatgcaatcgcggctggtgacctgcaccgggctttgttcatccagcaccggggcacgtagcacatgcggttccgggcaaacatgaaaacaatccatacagcggttacatttctgccgatcgctggccgcaacggtaatcacacctttgctacccagcacgccatacagcgcgccaaccggacaaatgtgcccgcaccagccgtgttcaacgaccagtagatcaaataaaaacagcgcgagaataagcagcgcgccgctgccgaagcccattaccaggctacgccccatcagggaaacggggttgatccattcccagatgagcgtgccagttaaggctgatcccaccagaatgaccaccaacagcacgtancgaatgtggcgagggatcgtcgcagactgattgaggtcaaagcgcctgcgtaaccagttcgctaagtcggtaatcgggttcagcgggcagacccagctgcaaaataatcgctttcctgccagggcgtagagcacggtgataatcaccgcaccggtcaacgccaccgtggcaggcagatgaccactggcaagactttgcagcgtcatcagcggatcggtcagcggaacggtgtcgaataacaggctactgctgtagttgccgtgcaagatccacacaccaaaccacggaccgctcaaaaacatccccagcacgaagaactgacaaaggcgacgtaacaccagccaacggtgactgcgccaccagccttttttctccagcgcctcgcgcccggcgtcacgtttacgatttgccattgttcccctccagccagccgaagcggtaatggtgacctaactcccctttcgccagtgacagcggtaacaccttgattgccggttgttccagcacgcatactttttcgcacttaccgcaaccggtacaggcgtcgctgtgaaccgtcggcagaaagcgggcgtgcttaccggtacgcgtgttgcgctccagctccagggtgatggcctcatcaattttcgggcattcgcgataacaaacatcgcagcgcagcccctgaaagttgagacagttttcctggtccaccagtaccgccagccccatccgcgcgtcgtcgatcgattcaatctcacgatccagcgcaccgctcgggcacactttggcgcacggaatgtcctcacacatttcgcaaggaatatcccgtgcgacaaaatatggcgtgcccgccgacaggccagaggccagcgtcgccagttttaaggtgtcgtaagggcaagcctgaacacactgaccgcaacgcacacaggcactggcaaaggcgttctcgtttatggctccgggcgggcgcaaccgcacgccagatgcgcgtgcggtttgctgttgtaaccccagcgccacacccacggcagccagcccgcctgctgtgcgaacgacatcgcgcagaaagcggcggcgaccattttgaggtttcgctgaccgggacataatggcttacaccttctccagtttgaccgcgcacttcttgaagtccgtctctttcgagagcggatcggtcgcgtccagcgttagtttgttaaccagctgtgcggcgtcgaagaacggcatgtacaccaggccctgcggcggacggttacgaccgcgcgtttcgacaatcgagatcacttcgccacggcgagaaaccactttcactttgtcgccacggcgcagatcgcgcgctttcgcatccagcgggtgaataaacaggaccgcttccgggaaggcacggtgcagttccggcacacggcgagtcatactgccggtgtgccagtgctccaggacgcgtccggtagagagccacaggtcgtactcttcatccggtgcttc

SEQ ID NO: 1329 - DNA, 13966 bp, Escherichia coli
  Strain O55:H7
  modified_base (508)..(508): a, c, g or t
  modified_base (1555)..(1555): a, c, g or t
  modified_base (4351)..(4351): a, c, g or t
  modified_base (5633)..(5636): a, c, g or t
  modified_base (5638)..(5639): a, c, g or t
  modified_base (5741)..(5741): a, c, g or t
  modified_base (12247)..(12250): a, c, g or t
  modified_base (13583)..(13583): a, c, g or t
gttcgaacggcagcgcgaagatcaccgctttaccatccggtttaccgtagaacttatagccttcgcccgctttcacgtacgggtcgttaccttcgctataacgccactgcgtttctttaccgttcaccaccggccagcgcagaccgcgcgctttgtggtagtcatcgaacggcgcgagatcgtgaccgtgaccgcgaccaaaccatgcgtactcttcgaacagccctttttgcagatagaagcccagctcgcgggattcatcgttcagctgatcttccgccagttcggataccgggaatttgctcacttcgggggtggcatacagaacttcgtacagcgttttgccacgcagttccggtttcttcgccagcagctcttccggccatacttcttcagttttgaagcggcgggagaactggactaactgccagaggtccgatttcgcttcgcctggcgcctgtacctgctgacgccagaactgagtacggcgttcggcgttaccgtaagncccctctttttctacccacattgcggtcggcaggatcaagtcggcggccagcgcactgactgtcggatacggatcggagacgatgatgaagttgcgcggatcgcgccagcccggcatacgctcttcattaatgttcggcccggcctgcatgttgttggtacacatggtccagtaaacattcagcttgccgtctttcagcgcacggtcttgtgctaccgcatgcagaccgattttcgccggaatggtgccgctcgggatattccacttcttctcgcagatatcacgatgtttctcgttagttaccaccatgtccgcaggcagacggtgagcaaaggtgcccacttcacgcgcagtaccacacgcggaaggctgcccggtcagggagaacggaccgcaacccggctgggaaattttgccggtcagcaggtgcaggttgtagaccaggttgttggcccacacgccacgagtatgctggttgaagcccatcgtccagtaggagatgactttcttgttcggatcggcatacagctgcgccagttgttccagctgatcttttggtacgccagtcatttcagcggttttttccagcgtatactcagcaacgaaggctttgtaatcttcaaagctcatcggttcggaggcgtcagaacccggattcttcgctgctttttccagcggatgggtcggacgtaaaccgtagccgatgtccgtcgcccctttgcgcaggttaacgtgcttgctgaagaagtcctgatttatcgcattgttttgaatgatatagttggcgatgtagttcaggatcaccaggtcagattgcggcgtaaagatgatgccgttatccgccagctcgaagctacgatgctggtaggttgaaagcaccgccacggtgacgtcctggttagagagacgacggttagtgatgcgtgaccagaggatcgggtgcatctccgccatgtttgcgccccacagcacaaacgcgtcagcctgctcgatgtcgtcatagcagcccatcggctcatccataccaaaggttcgcataaagccaantactgccgacgccatacagtgacgcgcattcgggtcgatgttgttcgaacggaagcccgctttaaacagcttggacgcggcataaccttcccagatagtccactgaccagaaccgaacataccgatcgattccggccctttttctttcagggcggttttgaatttctcttccatcacatcgaaggcctgatcccaggtgattggggtaaattcgccttctttgtcatatttaccgtttttcatacgcagcagcggctgcgtcaaacggtctttaccgtacatgatcttgggcaggaaatagcccttaatgcagttcaggccacggttaaccggtgcgtccgggtcgccctgacaggccaccacacgcccctgctgcgttccgaccagaacgccgcaaccagtaccgcagaaacggcacggcgctttatcccatttaatggcttcctgctgaccaacaacggcgcgggcaacgcccggcacgctgagaccggcagccgccgcagcggccgcaacggcgttagctttcataaagctacgacgactgagtttcatggtgtttcctcaccttgctcttcctgctggtgataaaccagcgacaccgccagcacgccctctacgttgcgtactgactcaatggtttggatcagcgtttcgctgtcttctgcttccaccaccacaatcaactgaccgctcggcgcgtcgctgacagcaacttcacagccgggaaaggcgttcagttgggtgctgatgtctgaaattcgttcgcttttggcctgcacgaccaggctgcaaacttgccagttagtgtgcatggagatactccgcagttatggctgataccggacagctggctgcacatgctccacatccgttgcaaagttggctattaagttgcggctggtagatcccggagagcgtcgggcgaaagataattgccattggctcacagctatcctgacagcggcggcattcaactgactgatacgccaggcacgcgtccccaatggtgaactgcaaatcccaggccctggtgtggcgcggagaaaatagcgattcggggcaagcctgcgcgcaggcgtaacagaagctgcactcgttatttttgaaattaacgctcggatagccgcccgcgccgcgttgcagaatgttgttttcacaagcattaatacaggcgtcgcagcgggtgcaatgggtcagaaaatgagattcatcaccggaccagggcggacggataccgttactggctttgcgccagcgaccagtgagtatgccccgacgggatgcatcaatcttcacattgaccttccatcattaacgcgctctgaaaattgagagcgaccaaataaaccgcataattaataagccatttttatagccgctaagatattaaaggatgtgtcaaagatgcataccccgatcgaggtaaaacctgtagcaggatcaaaagagtggcgggaagcgtggcaaaaacgggcttttgctcacatttcaaatggttataaatatatttatatagcgattaattcaccagagatatttctgctggtttgctctctcatcagaatttaacactaaaagagcaggtaaaattgtctgaatattctttaagttattcataaagcaaattaataaatctgatgaatatgttaaccttcagcgacatcatcggtgcaaacctataaatgaagaaggaaagcaaaaaatgaagaccattctacccgcagtattgtttgccgctttcgccaccacttccgcctgggcggcagagagcgtccagccactggaaaaaatcgcgccttatccacaagctgaaaaaggcatgaagcgtcaggtgattcagttaaccccgcaagaagatgaatctaccctgaaagtagaactgttaatcggtcagacgctggaagtcgattgcaatttgcatcgtctcggcgggaagctggaaagcaaaacgctggaaggctggggctatgattattatgtctttgataaagttagctcgccggtttccacgatgatggcctgcccggatggcaagaaagagaagaaatttgtcaccgcgtatctgggcgatactggaatgctgcgttacaacagcaagctgccgatcgtggtgtatacgccagacaatgtagatgtgaagtaccgcgtctggaaggcggaagagaaaattgacaacgcggtagttcgctaaactgccgtgaagtgcggcaccccgtaggttggataaagcggtcacgccgcatccgacatctaacgcccgagccggttgcctgatgcgacgctggcgcgtcttatcagcatacgccacatccggcataccatgccggatgtggcacatcattacaacgcaatatccgccacttctttttgaacgggttgcggtttcaactgcggtttcggcgtactatctgctgcttgcggtttgtcgtatttcagccccagcacttcgctggtgtactgcaactcgcgttctgttgccgctacatcaccgttcagcttgcgtccataagatggaacgatcgctttcaacgtagcctgccattgcgggctggaaacgcgatcgccaaatactttttccagcagattcaacataatcggcgcggcggttgacgcccctggcgatgcccccaggagcgcggcaatggttccttgctggtcactgaccacttcagtacccagacgcagtacaccacctttatcggcatcacgcttgataatctgcacacgctgccccgcttgccacaaacgccagtcctcttttttcgcttgcggatagtactctttcaacgcttcaanacgatcctcttcactcaacatcacctgactcaccagatatttcaccagatcgaaattatccagcccgacgtgcatcatcggcatcacgttagaggtggtggtggaactcatcagatcccacaatgaaccgtttttgaggaatttggttgagaaggtggcaaatggcccaaacagcactacgcgtttaccgtccagaacgcgggtatcgatatgcggaaccgacatcggtggtgcgccaacggatgctttaccgtaaaccttcgccagatggtgattaaccacgtccgggttttccgaaacaaggaactgtccgcccaccgggaaaccggcgtagtctttcgcttccggaatccccgattcctgtaacagcttcagtgccgcaccgcccgcgccgataaagacaaatttcgcacggatgttctgtgcagtgccatttttcagatcggcaacggtaacggtccaggtgttatcgtcattacgctttagggcgcggacttcgctgctgagttgcagcgagaagttagatttcttctgcaaggaagcaattaactggcgggtgatctcgccgtagttcacatcggtaccaatttccgtacgcgtggctgccactttctgttgcggatcgcgcccttccatcactaacggtgcccactctttgatctgcgcgtgatcttcagagtaacgcataccgcgaaacagcgagctttgttgcaacgcggcgtaacgggcgcgcaggaaattgacgttatcctcgccccagacaaagctcatatgcggaacggtattgataaatgaacgcggagtacgcagcacgccgcgctcgacctggtgcgcccagaactggcgggaaatctgaaatgcttcgttaatggcgactgctttttcaatactgatgctgccatcggcgttttgcggggtgtagttcagttccatcagtgcagaatgcccggttccggcgttattccagccgttcgaactctcctgcgcgacaccctccaggcgctccaccatggtcatcgaccattcaggctccagctcgcgtaaataggtccccaacgtggcgctcataatgccgccgccaatcaacagtacatcagtttcctgctcctcggacgctttcgcttttgccgccatcgaaacggcattaagccccacggccatcgagaagagcatggcagtcacttttttcatcttgttaatgccttacttttagtcgctttattgcaggtgagatttgcgcggcatcaacggtaacacttaagtaacaacatttaaataatgnnnntnnattatattctaattttagaaacattataatttcgttgattaattatagggttattagaaatgaagggatttttagcatattgacctggcggcagcagtccgncaggtcagcgtcgtaatattatgccgtccgggcaacggcatcacgcgaagcggcatcgcgctcttcgcccgtcagctcgctaagttgcccgttgcgcatttccagcaggcggtcggcgtggataaagtaatgatcatcatgactgatggcgaaaatagttttacccatctcctgcatcagcggcagcaacacctgataaaactcacgacggaagtgtggatcctgatccgccgcccattcatccagcaggataatatcgcgttcttctgccagcgccagcaacagcgccacgcgttttttctgcccttttgataacttcaggttaacaatacgcccgtttcttaactcaagcttatgagccattttcagctgcgccagccacttctcaaccagttgcgggttagcgggtttaccctccggccccagcagttgatcaaacagccagacatcggtaaacactgccgaaaacagtttgcgataatcttccggttgttcgccgctgacaggtttgccatccagcaagatttcgccgctttgtggctgatacaagcccgtcaacaacatcgccagcgtcgattttccgctaccgttgccgccaatcagaaacagcagctcgccacgtttgatggtgagattaatcggaccaacggaaaacgcgttatcctgataagcaaacgtcacgttacgcagctccagcgtttgccagctgggaaacgcctgcgggcgcggaaactctgctttgaaaggcgcgagcgcgaatttgttcagcttgttaaacgccacctgcgccgtcagcagcgtcggcaatgcgccaaccgccgaaagcagcggcgtacgcaggaataaaagcgtcaacgaataggtcgcggcaacgttggtatcagcccaaccgagactgttcgccatccagaacaccaggccgatagcgcccagcatcatgatgtttgaccagttcacggcactaagatggaaggtgtctgcgcgaataatatgatggcgatactcttgcgcatcaggaatgtagaggttgttaaacacatactcggcgcgttcccggttcagagtcagctctttgcgcccttcaagtacagtttgaaaatccgtgtacagcttgtcttcggtttcacgcagggtcgccatatgtttgtacacccgcgccaccagcacaaaaccgccccagatggtgactgccatccagatagccgttaccagcaacattttgcccgacagcatccacagatacgccgctgaaccgatagtgagaatgatcccctgcaccagttccggcagacgcacaaaagcaatggtgatattgcgcacatcgctggttaatcccgccagcaacgaggcgctaccgagttgttcaatgcgctcgacgtgagtatccagaatccgcttgataaattcactacgcagtcggtaaacgaagtgatgccccaaagtggtgagcgccagttgcgatccgagagtgactgccatcaacagcagcaataatcccagaaactccggcaacaccagcagactggtatccgccgtttcgataaggcgctgattgataaaagcaattaagccaatgcctaaagccgcactggcgaggcttagcgccatcacactgataaatggccagcgatactgccgccagacaagtacaagaagttccatgcagaaaacccggacaatgaattacagcccgcagtttaaacatcttcgcgcgcacagcaataataattcttatttttattcttttttacctgcctgacggaatgtcaggttgtagcggcagtcggtggtgagtggatgaaaccccgctttcaacggttgaataccgtgataaaacagccgcgattcaccgccccataccaccacatcgccatgttccaacaacaaacgtttgagcggatcattacgtttcaggccaccaaattgaaaaatcgcgggtaagcccagagaaacagaaacaattggcgcgcgcagatccggttcgtctttatcctgatgcagcgacagtttcgcgccaggagcgtagcggttgataagacaagcatctggctggaaatctggatagcccgccgccgtagccgcacgttgacataaattatgaaaactctgcggcatggcgggccacggtttatttgtttgcggatcaatgggcgaatagagataaccttgccgatgggtcgtccagcccagatgcccacagttggtcatcgccaccgacatggtatatcccccgggggtgaccatctggcgaaacggcgactggctggcaacgtcattaatatcgcggattagttgctctgcagcgttaaaagcaaaacgccgtaaaattaccgcaccagccgccagtggctcttgccacggttcagcatcggcaaacagatccaacattacctctcctcattttcagcttcgcggcgcagcagttgcgctttacgcgacacgccccagcggtaaccggaaagtgtgccatcaccacggaccactcgatgacagggaattacgatagccagcttgttggcggcacaggcgctggcaacggcccgtaccgctttcggtttgccgatggcgttagccagttgctgataactgacggtttcaccgcaaggtatcgtgcgcagtgcctgccagacttgttgctgaaaagcagtgccgcgaatatccagcggtaacgtcagcggagtatcgcgttgattgaggctggcgatcacttcacgcacatgttgctgaaacgtcagatcggcaggcgcgttgtcggcagcgggaaacatctgctgcaactcgctgattaatgtcgcgtcatcatcgcccagcaatatcgcgcaaatcccccgctcgctttctgccaccaggcaacgacccagctcacaatcagccagcgcgtaacgcaccgccagattttcgccaccgtgacggaattgtttagccgtcatgcccagcgtttcatcggctttgtggtagtaactgctgctgtcggggaatccggcgttaagaatagacgtcgtcacgctctcccctttcgccagcgattcgcgcaaacggcgagcgcgccaggcctgttgccaggctttaggcgtcattccggtagtcgctttaaacaaccgatgtagatgaaatggactcatcgccacctggtcggctaaggcttccaacgttacaggcgtttcctgttccagcagtcgacacgcgtgggtgattttatccaaccgatgttgctgggcattggctttatcaggttggcagcgtttgcaggggcgaaatccggcggcgagtgcctcgctggcatttgcgtagaaggagacgttttcccgcaaagcatgtctggcgcggcaagacggacggcaaaagatgcctgtggtgcgcacggcgaaaacgaattcgccgtcggcattcgggtcgcgggctaagacagattgccagcgttgatcgtcagttaagcatgtggcgtttttcataatcagctccctggttaaggatagcctttagtctgcccggccaccatcacgcaaaaaccaacaatcttgcgctttaatttttttcgctgacaaggaagcttttaaactgtggtgacatccaggttttaaagctatcgccttctttggtgatcatataaaccgccagcccttcccggcgaacaacttctttggctttctccggcccgagtaccatcaaacctgtatcccaggcgtcggcttccagcgccgtcggtgcaatcaccgtcacggataccagattgtgttcgatgggacgcccggtttgcggatcgataacatgggaaagacgtttgccgtccagttcgtaatagttacggtagctgccagaggtgctaatcccatgaccgttgatatccaccacggcctgaaccgcgttttctttatcggttggtttttgaatcgctacccgccacggcaggccttcaccgttcataccacggctgttcagcgcgccgcccaccgacaccagatagcgggaaatcccttcctgctccatcaagcgtgccaggtgatccgccgcataaccttcgccgacggtggagagatcgacatataaatccggcaggtctttttgcagatattgctgatgcgactgattaatgaccgtaaggtgctgtaaaccagttttggctttcatcgcgtcgatctgttcctggctcggaatttgaaccggctgttgttccggaccgaaaccccacagattcaccagcggcccgacggttatatccatcgcgccatcggtcttcgcgccaatgcgtagcgaggtggtgacgatatcggccatcgcttcacttaccggccacggcgataaactttgcgagtcgttaaagcgcatcagcgcggaatcttttttataggtcgaaagcagctgatcgtcggcgtccagctgggtctgaatcttttctttaagttcggcgctgcgtttggcgtcaatgcccgggatgctggcacgccagaaggtacccatagttttgccttcaagaacggtaacttcagtagcgtgggttttggcgggttgtggtttttgatcgcaaccaacaaagaagagcgcggcagccagcagtgccacgcgggtaaagcttatttccatacgtgattatcctcatgcgaacggtcgcaagagtacaccaaaaaactgagtttgtacgctgaaaacaatgaaaaaagggcccgcaggccctttgttcgatatcaatcgagattagaactggtaaaccagacccagagctacgatgttatcagtgttgatgccagcgtcacgagtgaactggttgtcgtccagcaggttgattttgtagtcaacataggtggacatgtttttgttgaagtagtaggtcgcgccaacatcaacatatttcaggatatcttcgtcgtcgtagttacgaccattgatgacacccaggtttttacctttagactgcaggtaagccagggacggacgcagaccgaagtcgaactggtactgagcaacagcttcgaagttctgtgctttgttcgcccaacccagggaacctacgcgagttgcgttgtaggtctgggtgtactgagcagccagatagatgttgttagcgtcgtatttcagaccaccagtgtaggtttcagcacggtcgccgttaccgatgtacagcgggctgttctgatcatcagtacgtttggagctggaaactgcagcaccgataccgaagccttcgtaatcataagtgatagatccgccaacgccgtcgccgttctgacgcagtgcttcacgaccgttgttagtcatgccttcgccgcttacgctaccgtttttgccctggtactgaacagcaaagttcaggccgtcaaccagaccgaagaagtcagtgttacggtaggtcgcgaaaccgttaccacgctgctgcatgaagttgtcagaaccgtaggtgtcaccaccgaattctggcagaacgtcggtccaggaagttacgtcgtaaactacgccgtagttacgaccgtagtcgaaagaacctacatcctggaatttcagacctgcgaatgccacacgggtccaggagttgttttcgttttcagcgctgttgccctggatctgatattcccactggccgtaaccggtcagctggtcagtaacctgagtttcacctttgaagccaagacgcatgtaggtctggtcaccatctacagacttgtcgtcagagaaatagtgcaggccgtctactttaccgtacagatctaatttgttgccgtctttgttgtaaacttcagcagcgtttgctgcgcctgctaccagcagagctgggaccaggagggacagtactttaactttcatgttattaaccctctgttatatgcctttatttgcttttttatgccactgcatactgattaaccctcattaatcagtcggcaagtccattctccccaaaaatgcagaataatccaacacgaatatgatactaaaacttttaagatgtttcatttatcgctatagatgtttcaaaatgtaaattcgagggaactttttaagattattgcggaatggcgaaataagcacctaacatcaagcaataataattcaaggttaaaatcaataacttattcttaagtatttgacagcactgaatgtcaaaacaaaaccttcactcgcaactagaataactaccgctatcatcattaactttatttattaccgtcattcatttctgaatgtctgtttacccctatttcaaccggatgcctcgcatccggttttttttacccttctttacacacttttcattattctgtgctaccacagaaaaactataacgcttgttaactatttcacaaataattaacatcagcataatttccagcaatctttgtttatttgcaattattttcgttgggctttttgtaggttatttgtacagcaaaatggcgcttgtacatctatttcccccaatgcaggatgataaatatcacgggagaatagagaatcatcaatcaggtaagagtctggaatttcacactgtaccctttatactgccctatcacttnnnnaagttttaacaggtcataaacacgaatgcgtcagaaagagacaacggccacgacccgcttttcactcctaccggggagcattacccgcttctttttactgttgatcattgtgttactggtgactatgggtgtaatggtacaaagcgccgttaacgcctggctgaaagataaaagttaccaaattgtcgacattacccacgctatccaaaagcgcgtcgatacctggcgttacgtgacctggcagatctacgacaacattgccgcgacgacctccccctcctccggcgaaggtttacaagagacgcgcctgaaacaggatgtctactatctggaaaaaccgcgccgcaaaacggaagcgttaatctttggctctcacgacaactcaacgcttgagatgactcaacggatgtccacctatctggacacattgtggggcgcagaaaatgtaccgtggtcaatgtattacctgaatggtcaggataacagtctggtgctgatctcaaccctgcccctcaaagatctcacctccggatttaaagaatcgaccgtcagtgacattgttgattcacgtcgtgcagagatgttgcaacaggccaacgccctcgatgaacgcgaaagtttttctaacatgcgccgcctggcctggcagaacggtcattactttaccttgcgtaccacgttcaaccagccgggacatctggcaacggtcgtggcttttgatctgccgattaatgatttgatcccaccgggtatgccgctggacagtttccgccttgagccagacgcgacggcaacgggaaacaatgataatgagaaagaaggaacggatagcgtcagtatccactttaacagtacgaagattgaaatctcctcggcactcaactctaccgatatgcgcctggtctggcaggttccttatggcaccttattgctggatacgttgcaaaacattctgctgccactgctgctgaacatcggtttgctggcgctggcgttatttggctataccacattccgccatttctccagtcgcagtacagaaagtctacccaacacggcggtcaataacgaattgcgcattttacgggcaatcaatgaagagatagtctcactgctgccgctcggcctgctggttcacgatcaggaatcgaaccgcactgtcataagtaacaaaattgccgatcatttgctgccgcatttgaatctgcaaaacatcaccaccatggcggaacagcatcaggggattattcaggcgacgatcaataacgagctgtatgagatccgcatgttccgcagccaggttgcgccgcgcacacaaattttcattattcgngatcaggatcgcgaagtgctggtaaacaagaaactcaagcaggcgcagcgtctgtatgagaaaaaccagcaggggcggatgacctttatgaaaaacattggcgatgcgctgaaagaacccgcacagtccctggcggagagcgcggctaaactcaacgccccggaaagcaaacaactggcgaatcaggcagatgtgctggtgcgattggtcgatgaaatacagttagcgaacatgcttgcggacgatagctggaaaagtgagacggtgctgttctccgtgcaggatttaattgatgaagttgtgccttcagtgttgcctgccatcaagcgtaaaggtctgcaactgctgattaacaatcatctgaaagcacacgatatgcgccg

SEQ ID NO: 1330 - DNA, 8088 bp, Escherichia coli
  Strain O55:H7
  modified_base (1587)..(1587): a, c, g or t
  modified_base (2440)..(2440): a, c, g or t
  modified_base (3826)..(3826): a, c, g or t
  modified_base (5936)..(5936): a, c, g or t
  modified_base (6143)..(6143): a, c, g or t
  modified_base (6592)..(6592): a, c, g or t
  modified_base (6861)..(6861): a, c, g or t
  modified_base (7131)..(7131): a, c, g or t
  modified_base (8078)..(8079): a, c, g or t
tcgcgatgcattacgacgtattttgctgctactgatgcaatatgccgtgacctcaacgcaattgggaaaaatcacccttgaggttgatcaggatgagtcctccgaagaccgcctgacgttccgcattctggacaccggagaaggcgtaagcattcatgaaatggataatttgcacttcccgtttatcaaccagacccaaaacgatcgctatggcaaggcggacccgctggcattctggctgagcgatcaactggcacgtaaactgggcggtcatttaaacatcaaaacgcgggatgggcttggtacacgctactctgtgcatatcaaaatgctcgcagctgacccggaagttgaagaggaagaagagcgtttactggatgatgtctgcgtaatggtggatgttacttcggcagaaattcggaatattgtcactcgccagttagaaaattggggtgcaacctgtatcacacccgatgaaagattaattagtcaagattatgatatctttttaacggataatccgtctaatcttactgcctctggcttgcttttaagcgatgatgagtctggcgtacgggaaattgggcctggtcaattgtgcgtcaacttcaatatgagcaacgctatgcaggaagcggtcttacaattaattgaagtgcaactggcgcaggaagaggtgacagaatcgcctctgggcggagatgaaaatgcgcaactccatgccagcggctattatgcgctctttgtagacacagtaccggatgatgttaagaggctgtatactgaagcagcaaccagtgactttgctgcgttagcccaaacggctcatcgtcttaaaggcgtatttgccatgctaaatctggtacccggcaagcagttatgtgaaacgctggaacatctgattcgtgagaaggatgttccaggaatagaaaaatacatcagcgacattgacagttatgtcaagagcttgctgtagcaaggtagcctattacatgaacaatatgaacgtaattattgccgatgaccatccgatagtcttgttcggtattcgcaaatcacttgagcaaattgagtgggtgaatgttgtcggcgaatttgaagactctacagcactgatcaacaacctgccgaaactggatgcgcatgtgttgattaccgatctctccatgcctggcgataagtacggcgatggcattaccttaattaagtacatcaagcgccatttcccaagcctgtcgattattgttctgaccatgaacaacaacccggcgattcttagtgcggtattggatctggatatcgaagggatcgtgctgaaacaaggtgcaccgaccgatctgccgaaagccctcgcagcgctgcaaaaaggaaagaaatttaccccggaaagcgtttctcgcctgttggaaaaaatcagtgctggaggttacggtgacaaacgtctctcgccaaaagagagtgaagttctgcgcctgtttgcggaaggcttcctggtgaccgagatcgctaaaaagctgaaccgcagtattaaaaccatcagtagccagaagaaatctgcgatgatgaagctgggtgtcgagaacgatntcgccctgctgaattatctctcttcagtaacgttaagtccggcagataaagactaatcatctgtaggccagataagacgcgttagtgtcttatctggcatttgcaccgattgccggatgcggcgtaaacgccttatccgtcctacgattcccattatttcaacagattacattaaagtaggccagataagacgcgtcagcgtcgcatctggcatttgcactgaatgccagatgcggcgtaaacgccttatccgtcctacgattcccgcgatttcctgaccctctcggcatataccgtcagcgtctgttttataacatccagcgttactggcttcgacaggcagctgtccataccggactccagacaccgctgcttctcttcagccaacgcattagccgttactccgattaccggcaacgtcagtcccaactgacgaatgcgttgtgtcaagcggtaaccatccatatttggcatgttgacgtcgctaagcacgatatcaatatgattcttgctaagtacattaagcgcatcgacgccatcattcgcggttttacattgatagcccaacgatcccaactgatctgccagcaaacgccggttaatcggatgatcatccacgaccagaatcatcatatcgtcattatcgctgaccgctttgtccgtcgacggcagagcgttagcaggatcgtcgctctccatctcgatcaaataaatacgcgccaacaatgccggtagctcatgcggagcagccacactgtgtacccactcccctggcgctttctccagcggaataccaatatgtcgacgacagaaggtcactaccgctctgccctgccattttttactcactacntcgtcagtgattaacacatcttcgggagtcggttcctgcccttcgtatgttgttacgacgatgccgctgcgctgcaaactggtttccaggaactgacagagcgacgcattgcggaccgccagccagcagcgtttaccactcaacccttccacgccttttttctgcgggtactgagcgccgtacaacggaatacgcacggtaaactggctgcccattcccggttctgaatctaccgagatatcgccgtccatcatgctgatcagtttttcacaaatcgccagacccagaccggtcccctggaagtttcgctgtacgcccgttccgacctggaagaagggatcaaacaagcgcaccacttctttcgccggaatccccacgccggtatcgcgaacacggatagagagataatcgccatcagcgcggacatgcaaaactatacagccggtatcggtgaattttatggcgttactcaacaggttggagatgacctgctgtaaacgcatcgggtcgccatttaaggccactggcacatccggttcaataaagcagtacaagcctaactgcttgcgtaccaccagcggtaaatagttggcggtgatgtggttcatcacttcacgcggtgaaaactcacgcggttcgatcatcaactgttccgattcaatcttcgagaaatcgagaatatcgctgataattttcaacaacaggctggaagagttgttcattgccgtcaccagacgatcgacgcctttcggtaactctttggtttgcaacagatccaggttaccgataatgccatacagcggcgttcgcagctcatgactgacggtggcaaggaacatcgattttgactggctcgcctgttccgctgcttgtgccatctcctgcaacgactcttccatcttcacgcgcgaagaaacatccaccagcacacaaatggccacgttttcattacgatagcgcgaatggacgaagctgatttgcagattggtattgttgctggtcaggacatcaacaaaattgacctgctgcccacagataatttgtgtcagtcgttggcggtcctcatgcgtaagcatattgagataggtatgcgccagttcgttacttaaaatattgacgccatcagcggtacgcaaaatgcagatacccactggcgcggaggcgacaatcttgcgattgaactgctcatgttcttccagtcgcagggcgtcgctttccgccggaatgaaaatacgtcgctcgtacatccgcgcgagagtaaacaatgcagctccggcaagcacattcagcaaaattgcgttaaggatcaacatgcgaatgcgttccagcaccttatcaaccggcaccgaatacacgatgctgagcgatgagggtggcagatttttnttcagcaccagctcccggaacccttccgtatagccaaaccaggagcgttcctgcatccagcgaggatcggccttaattttgctttctggtccggtaagcgaaatcagggtatgaccattttcatcaagaatggtaacccccatcggcaacgtacccggtaagaaaaagttctccatccggatggtctgctcgacacccaaaagcgcctgcaaccggttcgccagataaactggcgtcaacgcgtaaaaatacccgacgccagggcgcggaccttcgctgatccagtagaggttactgccgctatcatcttgtggtgcatttcgatatttattgatgcgttcatgcaaagctttcaacgcggtatcgcgttccactggcatatcacgcagaccgaaattggccatgcagaggttatcgctgccgattaaaaatacccggttgagatcgtaagccgcagaaaaattatcgcgccagtagcgcataaaccacgccaatgactccagagaacctcgccaggtgttactcattgctgaacaatcggagtcggcaaacagcggttcaaacgcaggcacatccgcctgcgtttctcgtccacgcggggaaagcacaccgttttctgccgataagcgattttcggcgatgtacttcagctctttcatcacatcagaggtgcgttgaataaagcgctgagcctgatcggaactcagattaaattcctgacgaatttccgattctcgctgatgtaacgcattaacgatgtaaaaaacggatgaaaaagcaatcaacagccagagcactaacgccaatgctctgaacatgtagcgcgaggctttcagggttgtacgaaaagaagcaaggtatttcaaaggggcgaagctccgcctcaggtgaccgatggagtgtggttaaggtagcggtaaaagcgtgttaccgcaatgttctgtcaccattgcaataatgcgtatcgcttagaaaccattgccttaaccaggaaagccggagtaaatggacagttctcagtacgaaaaataagaaatgaccaatctgccgacgcttgttaatggttatatcctggcgtcggcagatcgcccagcagtcttatctgaaaaaagaaagagccaggttgtgtgaagggatggatcaccagtcaaaacttttcaccagcgtcagctcgccagcattacgcatcggtacaataaatgtttcctgtttctcattgaccgatccttcatcggtgatcagcgtcagttgggcggtggttaattccgtttcgctgcgcccaccatagtagttgatatacacctgatagcgcccgtgaactggtgctggcatggcgaaaatctcgggtccgtacaccgtcgtgacatccatatccagtgcaccactgtttttcagcacggtgttaccgtaccaggcgtgttcgccatcgggcgtgacaacgtgaagatcgaggtcggtattgtccgtatcccacgagagaaccagccgtaaacgtgcacgaatcgttcctgtacccggcgttgagtaaaactgcattttttgtcggctttgcccatccgggctgatgacctgcacgctgttgctgccttcagtgaaaatataagggcgtgcaaatgaaccatcggattcaattctctgcggcatactggcaccgttgaccaccagccggccctgctgaactttacccgccgcagcataattctttattttgccgcggatctgcgctgagatattttgatcatctgccatgttgacggacgacgccgggtaattgatcgattgtgaaaaactggcatcttcgccctctgccggatgccagccagagagcggtgcgtcaatctcgacttcctgcacaccttcactgtgagcgacaggcgaaagcgccaccagtaacaacggaagaaaaatctttcgcatagcattagtccattaataattgtcgggtcagcgtttcgatatagttctcatcaagcccggtgggataaccatcaaaggccaggtgcagatactcatgggttaaatccagccgatcctgaagcgtaaagaagttacgaataaacagccgtttctgctgccgatcggtataggggaaacctgagactaaacgacngaccgcaaacacgtctggttcgttgtaccccgtctcgccttgtaatatacgccgccactgcggcatttttttcgccagccaggctttcgctttgggtaataactgacaggttgtgcgtggcgctccccagcggctaaggctgttgtcgggataagcaaacgcgagtatctggtcgtaacgctctccctgccccgcctgggccatggnttgccgccaggaaagcgtcccttcggtagcgcgactgccgtgataatgaaccggatcgcccgcatagatgagatcctgcgtccaggcggtcatcgttcgcgcccccgtggtagctggcgaagcagaaacacgctgcgtggcgctgctgtcggggatggtcaggcaatcgccttcccgattggcgttttgctgtaaaaaagtgcgtatcgccacagtcatggctttcgctgcctcaggtggcgtacttttcgcctcgcgatccagaactctggcaacgtactcttcacgatcgagatgcgactgcaatttcagtttgcccttttcggtcagtaaggtcgtctcaccgtggctgacaaacgtaatgtggttaccattggcaaacgtcacacgatagcgcccattaagtacgccgggttttactgccgtcgtactcttctccgctgtgattntcttcagcggctagcgcgcaaatagctccacctctacacattgcccactggcaacttgcgtcggcactggcaaaacccgattaagcaccgtcgcataacgggtcagtaccgttttgctggtgccactgccagtcacccacagcggtgtaccatcggttaaccagccagcaaaaccaccctgacggatttcctgtttatcatcggcaaaccagctccaggttttcacccgtacccgactaccgagcatagatgcgacaccgattttcgcntcgtccagcaccacatccagtaagacttcctgagctttgttttgcgcaggtaacgtcgctaatgaatcaagcagcgatttaaccgttaccgaggtttctggcttcagcgtagaaagagacgctaaccacgcaggtgcctgacgctgttgccagtattgcccccacacatctgccccaatatgcaaccgctgcggcgcaaaatagagcccacaggaacgtaccagcgcggtatcgcgcgttatgctctccccagcctgacaacaataaacntcttccggggagtttccgcgacactggtagggctgctccggttgatgggtatcctccagccaggcgtaaacatacagtttccataaactccctaacggcgtggtgagcgtgtcaggtaatgctgagactttggtcacgcctgatgacgacagctgatacagttgatcgtgctgcgcaccgcgcagcgccagttgtaacggcgtctcctccgcaagcgttggcagagtaaccaacgccaatagccagacgattctgcgccagttcacttatttcacctgcatcccggtccattcgctccctgccgcaacactttgctgtgcaggtgcataggaacgcacataacgagcaggaggcagaacgaattgccctttttgcgagaagcgcagcaaatggcggaaagtgaccgttcccgtcagttctttcaccggcaccatataggccagttcgcccatttcatttcgcgctttttccagcaattgcccctgctgttttccagcgttgggtttattgactgaaatgccccatgttgtgcgctcaacgtcggctcccggcgggagcggtacttccacctgaccatagcgcagaactgcatcctgctcgctggtaagcgtaatttcatcgagatacagcgcatcgctgtcaatctcattgctggtcaccggttgcagagtaaagctcatctcttcttcaccagggataagccgatacaattggcgttcaacggtcaccggaatgttactttgttgagccgtttttgccgcttcacgccagcggacctgcacattttgcggcgataattcgtcaccaaaagagagaatgtccggcacgccctgaccaacccaacgccagtattcgccccctccagttaacttatgtttggcccatgcgcccgcaggcgcaggcaacacaaccgaaggcattgtcgccatatatttcgccagccagtnnatggccagc

SEQ ID NO: 1331 - DNA, 701 bp, Escherichia coli
  Strain O55:H7
tcaatagtagattgctcagcggtcaaaccacttaaaatagcagccgcctgggtagcgtcgcccccgctattgagcagcacaaccgtgtgtgccagcggctgattgctgtttaccgctttatcccacgcatattgctgaacctgtggcatcaccgtggacttcaactgcgcttttttcagcaacgtcatggttaagacgtttgccaccgcatctgccagtggagattccggtgtatcgaggatcaggctgtcattgatatcgcgggtgtcttcctcagagaaatcttcagttttagttccgcgccgggcgatagcttcatccaaccctttcaacaacgttttgcacggcagattcatctcctgtgcccacgccagcaccagcgcccgatgcaataacggcatgttatctgcctgctcggcataactgtcgagcatatgctgccagtattccggttgttgcgttacgccgagcgcctggctggcctgccagtcggcgtaccatgcccatgccgtaaggaaggcgtcaccattgccatcttcaccccaccaggtaaagcgcgctccgggccccgccagttgcatcagccgcagacggttatcctgaatcatctgacgaatgtcgttagcggcggcactttgatgatcggcaagcgaacgccaggcgagactgagcgggatcagacggctaccggtgttgatcac

SEQ ID NO: 1332 - DNA, 2824 bp, Escherichia coli
  Strain O55:H7
  modified_base (796)..(796): a, c, g or t
  modified_base (816)..(816): a, c, g or t
cccccacggttcatcgactaacgcatcaagattgttgcggaaaatctcctgcggcgtttcactactttgtagccggatattgctcgcctgctcgggcaacatcagcgcgttatcgccaccgccgagcatgacatttttctgctgttcaacgggccagctgttatccacaaaagacagttttgtgctaatgctgtcctgcacttgcccattttgttgcagttctgcgcttaacaagccagattgctgaatgttctgcgccagcgaaatataattcgcccctttgtgcagcgtcagcgtctggcgcatctcagcgcctgcaaatttagtcaccagcgccaccggttcgttatcctgctgactgaagataaacagtcctgccgacggtttgtcgcccacgcgatacaccgttggcatactccacttcatgtagagatttttttccgaacgcagataagcacgcccctgcccgaccagcccgtcgccgttcatcccacgcgcggtgatacgccagcgggttaacgaatcaggcatcaggaacgtgaaatacgctttgccttgtttatcggttgtgagtgacggcatccatgccgcggtatccacctcttcacgccgtggacgttcaagcatttttactcgccgctcgctgcggttagttgcgccaggcgcaaccggctcgctggagagtgcctggtcgtagctgataaacgacagactggagctggtacgcacattgttacgccccagcggatagaaaaatttgccgatattcggcgcgatttctggttgcagcgcgtanatcatttcatcgaccacgcntaccgttagctgcgcagaaacaggtttacctttcagcgacgaggttaattcgacattgaccagttcaccaggctggtaatgggttttgtccgttttcacccggatatccagctggggaacggcaactttgatcccggcgttctgaaaactgtactgaccgttacgggtatacagcaccgaaaaagtgatgttaggcgcaaaggaattgctcactggaacacgggcttcatattgagtatcgtttaaacgttgtaacgtcagccagtttgccggatgcgatagcagcgactgctgttcaacgcgatcgcgttccagcgtcaataatgcttcatcaattggctccgggaaggtaatcagcatcttcgcggtttcgccaggctggtacagcgttttatctgccacgatatctaccgtaccagtatgcgacatactgcccttaccgctgacggcatggcttaacccggcgagaattaagccgtctttatcgcgtaacgtcagattgtagttgccaggtttatcgaaattgacggtaaaggatttgccgcctgacggtagatctccgctatggctcgtgcggtcttcgagacgcaaccattcatacgtaacaggaacctgttttgaagattccagcgcggcataacggaacacaaccgactcgccgctattactgtattgtgcggcggtacttaaagagtaatgcgccaggccgcgttcaatgaggatctctttggtggtggtgacgcgatacgccgcgccgtcactggcggagacggttaacaaatagcgactcggtttatcggcggcggggagatttaacgccacatgaccgctggcgtcggacaccgtgtcgctgccttccagcgacacggggaaacgtccggcataacgcaaatagttaccgaccattgataattgctgagcgcgcaaacttaactgcacgcgggcattttttaccggctcgccatccgggtagagaagttgcagtttgccgctgaccgcttcgccagttttgaactcttttttgtcgagagctaaaccaatctcgaaatgtggcttgatgtagtttgccacgcgaaaactgctgctatagacctgattgcggtaagcaagacgtaactcataacctccggcaacggcattttctggcaggcggaaacttccctgcccgccattgcacgcatccagcgtgacatcgacggtttgcaacagactgccgttagcgtccagcaccgaaagcttcgccggggcgctgacgatgggggatgaatgcaacggatcgtggaactcgcggcccatcactttaacatcgacacgatcgcctgcgcgatatagcgggcgatcggtaaaaatatacaagcgggtgttgtagatttcgctttcgtagaagaagttctcggagacaaaaacgccgccttcagcatccttacccagaatgtatgaacgttctggcgatatatgttgtaactgcaaggtaccgctgtcatcggtcacaccgcgggtcatcacgccaagaccgtcagtccacaagatctctgagccgggcttcgcttcaccctgttttttacccgcggtccacaccagaagctctttgcctgacactttgctaagcgccacggtatcggaaacaaacaccaccgtcgtcgcccgatacccaccaaccatcgcctcgacgaggtacagtcccggctcttgttggccgagaggaatataaatgttacccggctgcggcgagatgaaattgctggatgcgccttccagttttaccccttgctgcggctcgaccggtttagcctgccatagtggataacggaactgttccaccaggggatattttttcagcggggaaaactggttgttctgtacataacgggaaggtttaataatggcattgccgagctgtaattcgggtaatgcctgagtcacattctgccgtgactgagaagagaaagtacgctgcatcacgcggcgagatttgccgtaccagttatcccacagccaggtcagcgta

SEQ ID NO: 1333 - DNA, 18156 bp, Escherichia coli
  Strain O55:H7
  modified_base (171)..(171): a, c, g or t
  modified_base (814)..(814): a, c, g or t
  modified_base (1444)..(1444): a, c, g or t
  modified_base (2599)..(2599): a, c, g or t
  modified_base (3551)..(3554): a, c, g or t
  modified_base (4616)..(4616): a, c, g or t
  modified_base (4770)..(4770): a, c, g or t
  modified_base (4840)..(4840): a, c, g or t
  modified_base (5608)..(5608): a, c, g or t
  modified_base (8532)..(8532): a, c, g or t
  modified_base (8791)..(8791): a, c, g or t
  modified_base (8820)..(8820): a, c, g or t
  modified_base (14109)..(14111): a, c, g or t
  modified_base (14113)..(14115): a, c, g or t
agcccgtcgcccagatattgcggttgcaccacaatgcgatgcaggtttttctgctggcgcaaaaatgccatcgggtcaggaatacgatacaggcgaacgtccacgccgccgtactcttccatctgatagcgccgataatcacgccccggcgcttccagtcgcactttcgantcttcactgctgctaaaactgctgtcagcaagcaaaaagaatgttcccccggcgggcggcgcatagttactggaaggaagcgaatcatcagcattagcaagccctgttcccacaagagacagggacaagcacgctgctatcgcgccagaaaatttaaacgataaatgccaatgaaattgggattggaatcgttgggtatccatcgggtgtccttccatgtcataagttgttgcagactgactgcgcgcattccgttgtcagttttcgtggcgcttccggtgtggtagatgacgtaacgccccatccagaccattaagtgctgggcatcgccctgatcgaaaaaaatcatatcgccaggcagcgcctggtttatgtcctggccaataaactggctgttgtactgaatcaaattaatcgcggtcacgtaggggccggttttcccgttcccctgattccagttttgcgccagttgacgctgttcaggtgttagcgtcatctctggcggcaaatactggctagataaaccgttactttttagccatttactgtcgtgaactttcagcgtctcgttcgccgcaaatcgcaccaggcccgcacaatcctgctgataccagcgtggacttggcccctggcggagctgttnttgtgcaatgcgtacaaaccaggcgcgaaacagcccggattgttcgacattcagcatttcgctatgggcaacaacacaacacagccagcaaatcagcgccagcagcccgtgcctcatagcggctgccagattatgggtagccactgccaggcggcaccgggttccatctgggccagcttcatgacataacgcggttgttgagataaagcgtccagcttcggcattaataaagtttgtgcggcgttataaaaaaccggttcgagattcttcggcagactggtcaacgtttcgttacgcagcagtttcgccacgccttgtggattgatatagagcggaacgatgccatcagtgggtattacatccaccattgccgggcgggttttattcagtgtttgcagggcgttattaaccagcgtgtcatcgagggagaaaagcagcgttttgttttgcatcgccagcgacacgcggaaaaaataatccgacattaattgatcgggttgcgccgcctgcgctttcggatactgaccgtatcgggaactcacttcgcgacgccagatttgcgcttcgccctgctgagtctggcttaccggcaaaacaccttctggcgctttgctttcgtgcgcaccaatnttttgcgtaaacagtttccctggcaattgcgcctgttcggcagtgccatcaaactgaccgacaaacagcggggtttgcaattttgagtcttcataccagcacagccccgcggcaccgtccaacgccccattcaacttgtcgttttcctggctgatgtgcgaaagcatctcttcggcaataccgtgtgaatacggcaccgccacacagaagctggccccggcaggcatactgttccagaccggcgtaaaatcgaaactggcatctacgctggcggattcatcatttaacgccacaaaactgtgccagccgtcgttacccatttcgaagcgtacgccagcaaaagaaggcattaaccgctggtagccaaaacccagcaacctggcgctggccacgatgcgctggcgtactggcgttttttcggcagcacgctcttccaggccaaagctggcttgccagcgttttttgccgctcaacaaatcacttgcgatcgccgtggcttcggtatcctgctgatcatctttaaacagcatatccgtgctggaaaacaccagcatcttgtcctgatatgtcgcgaacatcagggcgttattgccgttatagcgcaactgataaacaggaatagtttcactatttatcttgatgctactgatttccgttttgcttaactggctgtcgctggtagcggcaaataacaatggctccagcagtttgcttaaaccactgcgttggatcagcaccatgtaatgtgaaagatggccttgtttatcgtgccatagcgccgcctgcgcgggctgatctaagagtgacgaaaagagcttatctttcagcgtgagatcgtgttcatagacaatgcgacgaatgctgccttcaatgcccagacgatcggcatgattctgataatagaaaacgaaatcttcactcagaacatcgtggagaaacggaatggtgaggagatctttgggaagctggcttagagaatcgctgtcgagaaagaggtccggctcattgagatcaatttgcaaattattgtgcaccaccagcggcgacaacgttttttctggcccactgccagcatattgcaacgcccagacgccagcggaaagcagtgctattgcgccaaaacctacaagaccatagaaccgccagcctttcgcnttttttcaccactcattgccacattccttgtgtatagccagccattttttacggacacagccaaactttaccgcgccctaatacgacaaaagcccagactttgcagcctggacttttcaattcaaaaaagggagatggctcccttttggcatgaagaagtaaaattattcttcttctggctcgtcgtcaacgtccacttccggagcgatttcatcgtccccttccgcggcactgccgtcgatggtatccagatcttcctcgtcaaccggttcagcaacacgttgcagacccactacgttttcatcttccgcagtacggatgaggatcacgccctgggtgttacggcccacgatgctgatttctgaaacgcgagtacgtaccagcgtaccggcatcggtgatcatcatgatctggtcgcagtcatctacctgtaccgcgccaacaactaaaccgttacgttcggtaaccttgatggagataacccctttcgtcgcacgcgacttagtcgggtattccgccactgcggtacgtttaccataaccgttctgcgttgcggtgaggattgcgccatcgccacgaggcacgatcagagagacgactttatcaccttcgcctaaacgaataccgcgaacaccggtggtgttgcagcccatcgcacggacagaagactctttaaagcgcaccactttaccttcggcggagaacagcattacttcgtcttcgccgctggtcaggtcaacgccgatcagctcatcgccttcaaccagtttgatcgccactttaccggcggtacgcagacggttgaactcggtgaggacggttttcttcacagtaccgttagcggtcgccatgaagactttcacgccttcttcaaactcggtcaccggcaggatcgcggtgatacgttcgtcctgctccagcggcagcaggttgacgatcggacgaccgcgcnnnncacgagtggcctccggcaactggtaaactttcatcgaatagacgcgaccacggctggagaagcacagaatatggtcgtgcgtgttcgccaccagcagtcggtcgataaagtcttcttctttaatacgtgcggcagatttacctttcccgccacgacgctgcgcttcgtattcagaaagcggctgatatttaacgtagccctggtgagagagcgtcacgaccacatcttcctgggtgatcagatcttccaggttgatgtctgcgctgttggcggtgatttcagtacgacgtttgtcaccgaactgttcacgaaccagctccagctcttcacggatcacttccatcagacgatcggcgctaccaagaatacgcagcagttccgcgatctgatccagcagctctttgtattcgtcgagcagtttttcgtgctcaaggccggtcagtttctgcaaacgcagatccagaattgcctgagcttgctgttcggtcaggtagtacagaccatcacgcacgccgaactctggctccagccattccggacgcgcagcatcgtcgccagcacgttcgagcatcgcggcaacgttgcccagctgccacggattagccaccagcgcagttttcgcttctgcaggcgtcggcgcatgacggatcagttcgatgatcgggtcgatgttcgccagcgccacggctaatgcttcaaggatatgagcacgatcgcgagctttacgcagttcgaaaatagtacgacgggtcaccacttcacggcggtgacgaacaaacgccgcgatgatgtctttcaggttcatgatctttggctgaccatggtgcaatgccaccatgttgataccgaaagaaacctgcaactgggtctgggagtagaggttgttgagcacaacttcaccgaccgcatcgcgtttcacttcaatcacgatgcgcataccgtctttgtcagactcgtcacgcagcgcgctgatgccttccacgcgtttttcttttaccagttccgcaatcttctcgatcaggcgcgctttgtttacctgatacggaatttcgtggacgatantggtttcacgtccggttttggcgtcaacttccacttcagcacgggcgcggatatataccttgccgcgaccggtacggtaagcttcttcaataccgcgacgaccgttaatgattgccgccgtcgggaagtccggccccgggatgtgttccatcancccttcaatgctgatgtcttcatcatcgatatacgccagacaaccgttgatgacttccgtcaggttgtgnggcgggatgttggttgccatacctacggcgataccggaagaaccgttcaccagcaggttaggaattttggttggcatgacgtcgggaattttttccgtgccgtcatagttatcaacgaaatcgaccgtctctttttcgagatcggccatcagttcatgggcaattttcgccagacggatttccgtataacgcattgccgccgcagagtcgccgtcgatggaaccgaagttaccctgaccgtctaccagcatgtaacgcagcgagaatggctgcgccatacggacgatcgtgtcataaactgccgagtcaccatggggatggtatttaccgattacgtcaccaacgacacgggcagattttttataggctttgttccagtcattgcctagtacgttcatggcgtaaagtacgcgacggtgtaccggcttcaggccatctcggacatctggcagcgcacggccaacaatgaccgacatcgcataatccagataggagctcttcagctcttcctcaatgttgaccggtgtaatttctctcgcaaggtcgctcatctaaccgctatccctctactgtatcccggattcaaaggtcgcaaattataacacagccgcgcagattgaggtaaacctatacgctttattcacatccaatgcctgatatactcgtttgtcttgccaattacggagtagaagtgccaatgaatgccgaaaaatcgccggtaaaccataacgtagaccacgaagagatcgctaaatttgaagccgtcgnctcccgctggtgggatctggaaggtgagttcaaaccgctgcaccgcattaacccgctgcgtctgagctatattgccgagcgtgctggcggcttatttggcaaaaaggtgctcgatgtcggttgtggcggcggcattctggccgagagtatggcgcgcgaaggcgcgacggtgaccggtctggatatgggctttgagccattgcaggtggcaaagctgcacgcgctggaaagcggcattcaggtggattacgtgcaggaaaccgtggaagagcacgcggcaaaacatgccgggcagtatgatgtggtgacctgcatggagatgctggagcacgtccctgatccgcagtcagtggtcagagcctgtgcgcaactggtgaaaccgggcggcgatgtctttttctcgacgcttaaccgcaacggcaagtcatggctgatggcggtagtcggcgcggaatatattttgcgcatggtgcctaaaggtacacatgatgtgaagaagtttattaaaccggcagaactgctgggctgggtagatcagacaagccttaaagagcgacatataaccgggctacattacaacccgatcactaatacttttaaactcggccccggcgtggatgtgaactatatgctgcacacgcagaataagtgaggttgttgtttggattcatccggcaaccgcgccaatgcctgatgcgacgcttgccgcgtcttatcaggcctacaaatgctctccgtaggcctgattaggcgtttacgccgcatccagcaatagtgatggtcagacagcgattaccatttcaccgtcatcgacaaaaaccctgccgtctgggcaaaatcatcactccctttctgccacgccacgctaccacgcagcgaaactcgctgactgatattgcccgtgactcccacttttatttcaccccgttgcttcaccgcatcgtcactgatagtgctggcatcttcttcaatttccgtcgaatggggatcgtgataataattcagatctaatgttggtatgacatgaacagcggtacgccattcgctgtgtaaacccagccgcgtctgaatatcatcaccctgcgattgtgacacgcgcgcacggttagcggcggtaaaatcatcctgctgcacgccctgataaatcacctgcgcctgcggttcaatcaccacaccacgccccggtaaccactgataccccgcttccagcgaggcgataatccccgacgaatggtaatgatccacgccatcttcatgttcagaaacatcattgctaaaccacgcgtactgcaaccagttatccagccaggccccctgcttctgcttaccgtgctgaaaccagcttgaggtcagcccaaccgcataaccgtggttctggttatcggcgcgagttccggtcatactcgagcggctgtcgccctggttatcgctgtagccaccaacaatcccaagcatccactcgccatccgtgccccagcgcccgctaaacagatcgccgctaagttgcaccgtagaagtgtcttcatgttgagccagttgccccgctgctgtgtaatgataatctccgccgataacacgtaaattcagcgtctgaccatcgccacctgcgtgatcgcgtcgctccatcataaacgcctgatttgccgcccgcaggttattgagataaccgccaactttggcattcaacaccggctggtaagcaggcgtaggttccgggtcgggtgttggatcaggatcctgcgtgggatcaggatcgggagtcgggtctggatcaggtggcgatggcggcgttacttcttgcgatcgcagataccagtcgttgttatcttccaccagcgtgtagtcatacgctcccatattgacgtagccgctgcctgccagactgaactgcgcattgttttgaaactgcgtgggatcagctgcgaaatcaaccactttaatgcctgtcgatgtcggctcaccaatccctgtaatggagttaaccaccacagttgtgttgccagcagtattaccgttcatcaccaattgatcgcttaccgagtcatcgccgtttaattcgctatcgagcagtagcgtaccgccgccggtataatcaccgtttaccgtcagcgtatcgccagcgacgccattttgcaggctaaccgcaccggacgtattggtcagattgccattaaccgtcacgttggaaagataagtcaggctgtcagtttcaaggttggtattaagctcacctgtcaacgtcacaccatcggtggcattcaccagcgtcccatcgcagttaaacagtgaggcattaagggcgacggaagtatcctgcccggtcaggcgcaaaaccgtaccatcgctgatgtcgatagtgccgctggaagtagcatcaattgactgaatatcctgatccgcgccagtaacgaacgttgccccgtcaccgacccatagcgacgaagcataagggaagatatccgcaacatcaccttgcagcgtgccctcttctactctcaccgctgactgcgttgtaccgctggcggtcagctccagtgtacccgcccccgttttagtcaatgtgctaccctcatcctgatgctgcccgctgctgtcagccatcagtgcgccccactgcgtgtctacccccgcatcaactgccacttcaccgtcggcgcgcatttcaatatcacgcccatgctcagtcgttgtagagcgagtatcgacattggcagtaatctccatcacgctttcttgtggcttatcggtaaagataacctggcggttataatgggtatctccaagctgcgagttgtcgctcaccatcagcgtaccggaagcgatttgcgttgtgccgaggtattgattgtcatttgccaggctgacctgcccgtcacccgcatcgatcaccacgtagacgccatctttcccgtcgccgccgatangcatatcgtttccgcctgcaagatctaccacatcctgactgccgataaccgttccgctgctgccactgacttcaaggccatctttgtatgatgtaccgctctgccaggtggagaaatcagagagatcgagcataccgccgtttaacacgatcgactgcggatcgtcctggagagcggcaagatctgccgcgtcgccttccagcgaaagcaccgcaccagcatccaccactatatcgccggttagcgccatcgactgcgnccccgccagcacatagctgccgttttgcncaatggtgagctgaccagcaccttcgatggtgccagcaaaactgccttgattaacagtaacattgccaccagcatcgatatttaaagtgccattctgaaagcccgtcaatgagtgcgcaaaggtttgttgggtggagccaacatttagctctgcctgattctggtacttatcaatactccctatcgtcagaccgtagcagtcttgcggatcgtcctggcaatgcgtatcgccgacattcatcagggagttgctgcggcccagggtaacttcaccgttttcaatctgcatctcaccagtaaagtcattgttatctgcattaagtaccagatcgccggaacctgttttggtgattaacccggtaccagcaatagagtcaacagctccgtcattctctgtattgccaataaccagcgtttttccgtcggcaatatcaaaggtaacttcacttaagccgagatacataaagccacccgccgcagaggaaggaccatctccatagcctgctgcgctattgttctcatcgactaacacgcctccgttctggctgtagctgtcatcaacagaaatatcaataagatagggagccgtcgcgctattggtatatatcgccccgccataaccttcggcagtgttatttgtaaaggcagtgttatttattatcgtataacctgaaggatgcttgctgtcgctattattatctgtgacatcgattgcgccgccatcgccatcactgtaacttgttgatgtatatgcctggttattgttaaaaacatcatcacttaaatagatatcattattgatggtataaattgcaccacctttgccgtcattagcgatgttattgcgaaacacggcgttagtgacacgtaaatcgatggcaccggtatcgttagtaccagaagaatagattgcgccaccatagccgcctgcgacgttaccagaaaaaataacatccgtaagattcagcgttgagttttctttagcaaatattgccccgccgttattatattctcctgaaacggtgttattggcaaacagagtcattccagtttcattttctggtgataatgtaaattccgctccttgttgcaaaaatacggccccaccgctggcattattggtcatatccgaaaaaaccagccattgcccatcggcgatactccagacctgcgtaatgcctgaaaggctttgcctgctggcgtgacaactcgctttgatatcatatccctggcataaatcaatggccgccgcgacaccgttagcagagaaaagagatgcaatcattgacgggagtagagataaatactccttgcgtagaaagataacccgcatattaatctgaccatcattttatataagacggcatatttaaacgcattatacaatatgggttatctttcttttgtaaattgtccaacccgatgcaatagctattttgttattatttgatgaatagtatcagtgcgtcataattcaagttaataaccttaagggataccagttatatttaaactaaattaaagtaatgaataattttcttataatataaggcaaattaacaaaatggcttcgcatttaacaataaccgaatagaaaacaaccatttcgacatcaacaatcgcttacattcgcttatatattgaccacaactgatacatcagattatgtgatgactcgtgcttagatcaatttttgcaatcattagcaaaaagattaataaaccatctatatcaatttatccaacctattctgccgttcaagaaatcgccgaacagttatttttaacaaatttttctcttcccattgactttcccggacaccttgtctgacctaaggtgcgcgaaagccactttttccttcctgagttatccacaaagttatgcacttgcaagagggccattttcacactatcttgcagtgaatcccaaacataccccctatatatagtgttctaagcagcttcccgtactacaggtagtctgcacgaaactattgcggaaagaattccaaaaacaggtacgacatacatgaatcagaatctgctggtgacaaagcgcgacggtagcacagagcgcatcaatctcgacaaaatccatcgcgttctggattgggcggcagaaggactgcataacgtttcgatttcccaggtcgagctgcgctcccacattcagttttatgacggtatcaagacctctgacatccacgaaaccattatcaaggctgccgcagacctgatctcccgtgatgcgccggattatcagtatctcgccgcgcgcctggcgatcttccacctgcgtaaaaaagcctacggccagtttgagccgcctgcgctgtacgaccacgtggtgaaaatggtcgagatgggcaaatacgataatcatctgctggaagactacacggaagaagagttcaagcagatggacacgtttatcgatcacgaccgtgatatgaccttctcttatgctgccgttaagcaactggaaggcaaatatctggtacagaaccgtgtgaccggcgaaatctacgaaagcgcccagttcctttatattctggttgctgcgtgcctgttctcgaactacccgcgtgaaacgcgcctgcaatatgtgaagcgtttttacgacgcggtttccacatttaaaatttcgctgccgacgccaatcatgtccggcgtgcgtaccccgactcgtcagttcagctcctgcgtactgatcgagtgcggcgacagcctggattccatcaacgccacctccagcgcgattgtgaaatatgtttcccagcgtgccgggatcggcatcaacgccgggcgtattcgtgcgctgggtagcccgattcgcggtggcgaagcgttccataccggctgcattccgttctacaaacatttccagactgcggtgaaatcctgctctcagggcggcgtgcgcggcggtgcggcaacgctgttctacccgatgtggcatctggaagtggaaagcctgctggtgttgaaaaacaaccgtggtgtggaaggcaaccgcgtgcgtcatatggactacggggtacaaatcaacaaactgatgtatacccgcctgctgaaaggtgaagatatcaccctgttcagcccgtccgacgtaccggggctgtacgacgcattcttcgccgatcaggaagagtttgaacgcctgtataccaaatatgagaaagacgacagcatccgcaagcagcgtgtgaaagccgttgagctgttctcgctgatgatgcaggaacgtgcgtctaccggtcgtatctatattcagaacgttgaccactgcaatacccatagcccgtttgatccggccatcgcgccagtgcgtcagtctaacctgtgcctggagatagccctgccgaccaaaccgctgaacgacgtcaacgacgagaacggtgaaatcgcgctgtgtacgctgtctgctttcaacctgggcgcaattaatagcctggatgaactggaagagctggcaattctggcggttcgtgcacttgacgcgctgctggattatcaggattacccgatcccggccgccaaacgtggagcgatgggtcgtcgtacgctgggtattggtgtgatcaacttcgcttactacctggcgaagcatggtaaacgctactccgacggcagcgccaacaacctgacgcataaaaccttcgaagcgattcagtattacctgctgaaagcgtctaatgagctggcgaaagagcaaggcgcgtgcccgtggtttaacgaaaccacttacgcgaaagggatcctgccgatcgatacctataagaaagatctggatgccatcgctaatgaaccgctgcattacgactgggaagctctgcgtgagtcaatcaaaacacacggcctgcgtaactccacgctttctgctctgatgccgtccgagacttcttcgcagatctctaacgccactaacggtattgaaccgccgcgcggttacgtcagcatcaaagcgtcgaaagacggtattctgcgccaggtggtgccggactacgagcatctgcacgacgcctatgagctgctgtgggaaatgccgggtaacgatggctacctgcaactggtgggtatcatgcagaaatttatcgatcagtcgatctctgctaacaccaactacgatccgtcacgcttcccgtcaggaaaagtgccgatgcagcagttgctgaaagacctgctcaccgcctacaaattcggggtcaaaacgctgtattatcagaacacccgtgacggcgctgaagacgcgcaggacgatctggtgccgtcaatccaggacgatggctgcgaaagcggcgcatgtaagatctgatattgagatgccggatgcggcgtaaacgccttatccggcctacggctcggtttgtaggcctgataagacgcgccagcgtcgcatcaggcacaggatgcggcgtgaacgcctaatccggcctacggctcggatttgtaggcctgataagacgcgccagcgtcgcatcaggcacaggatgcggcgtaaaatgccttatccggcattaaactcccaacaggacacactcatggcatataccaccttttcacagacgaaaaatgatcagctcaaagaaccgatgttctttggtcagccggtcaacgtggcccgttacgatcagcaaaaatatgacatcttcgaaaagctgatcgaaaagcagctctctttcttctggcgtccggaagaagttgacgtttctcgtgaccgtatcgattaccaggcgctgcctgaacacgaaaaacacatctttatcagcaacctgaaatatcagacgctgctggactccattcagggtcgtagcccgaacgtggcactgctgccgctgatctcgatcccggaactggaaacctgggtagaaacctgggcgttctcagaaacgattcattcccgttcctatactcatatcattcgtaatatcgttaacgatccgtctgttgtgtttgacgatatcgtcaccaacgagcagatccagaaacgtgcggaagggatctccagctactacgatgagctgatcgaaatgaccagctactggcacctgctgggcgaaggcacccacactgttaacggtaaaaccgtgaccgttagcctgcgcgagctgaagaaaaaactgtatctctgcctgatgagcgttaacgcgctggaagcgatccgcttctacgtcagctttgcttgttcctttgcctttgcagaacgcgaactgatggaaggtaacgccaaaattattcgcctgattgcccgcgacgaagccctgcacctgaccggtactcagcatatgcnnnannngctgcgcagcggtgcggatgatccggagatggcggaaattgccgaagaatgtaagcaggagtgctatgacctgtttgtccaggcggcacagcaagagaaagactgggcggattatctgttccgtgacggttcgatgattggtctgaataaagacattctctgccagtacgttgaatacatcaccaatatccgcatgcaggcagtcggtttggatctgccgttccagacgcgctccaacccgatcccgtggatcaacacctggctggtgtctgataacgtgcaggttgctccgcaggaagtggaagtcagttcttatctggtcgggcagattgactcggaagtggacaccgacgatttgagtaacttccagctctgatggctcgcgttaccctgcgcatcactggcacacaactgctgtgccaggatgaacacccttcccttctggcggcgctggaatcccacaatgtggcggttgagtaccagtgccgcgaaggttactgcggctcctgtcgcacacgcctggttgcaggccaggtagactggattgccgaaccgttagcctttattcagccgggggaaattttgccctgttgttgccgagcaaaaggcgatattgaaatcgagttgtgatcgggtactagcgccagatacgacgcttacgcgtattatctggcctacaacgattacatggcgtagtaatacgcttttacctgctcccagtccgctttggggatcggctccagatatttttccagctggcggaagtcatgattaatcgctttatcgcgacgcaagcggcgacgacttttctccagatcaagaaaaccagcttctgccttaccttctgttttcacatagatatggcgaacataacaacagccatgctgacgattaacgctatgcattttcttaaacgccagcgccactgctttcaacatggcttgccgtacttcgtcagaatagggcgttactgcatgctgggcataccagtcagcaatgctgatgaaccccgccatatcttcagtcaccagcaacgcgcgccattccccctcaattttcaccgcttcaccaaaaacgatcttcggcacgatgacaccggcccgttccagttctttaattaccgcaacctcacggacaatcgttggtcggccgaaaggataacgtacggaatgaaacagatgatgcgtcatgcgctttacatatagctttttgccgttgcgctcgacgcattgcaccccgctcataccattacggcgatagttaggctcttcaacccagtcgccctctgttgcccaccagtgattaaattcgtcgtgctttgctgaaactgccataccctatcgcctgtcattttttattaacgacaatgactataggtggttacctgcgaaaaatcttaatgaaacgtgtcgtattaatgaatttcttttgccactactagcgcgacaccgctttttcccttcatttgcagcgcatagactccaccagccactaccactaatagtgcgcccagcagataaatcattcggtagccagtatgtgcaaccatcatccccatcacacaggctcccagcgccaggcctgcatccatcgcattgaagaagagggagtttgcgacaccgattttatgcggttccactgaactgataatctgcgtctgaaaaactggcgtcacggaaccatacccgataccaatcaacgcgccagaaacgaccatcattacgctgccctaggtgtagccgagaaccaccagcccaaccgtaaagaacagcaggcaggggtaaaccacatatttcgggccttttttgtcgcaaacattgccggtgaaggtacggcagatcatcaggaagatggcgtagcagagcaggaaattactggccgccgacatcagattaagttcgcgggcgtaaagcgccagaaaggcagaaaccccggcatacgaaaaggtcataaagaatgtaaccatggcaaacggcaatgccgcgcgatcgaacatggcggcgaagcccatctttggctttgaaccgtcggcatggctgataaccggcggcacggtcataatcagcgacaggataatccccaccgccgcaacgccagtacataaccagaaagccatattaaaggcctcccagcgcgccatattcaggccaatccacggcccgaccaccattgccagccccattgccagagagaaaaaactgatgccctccccacgtcgggaggccgggatcagccgcgcggaaatcgttccctttaccgttgtgataaccccgaaggtaataccatgaagcaccctaataaaaagcagtgattctattgagtggcaaaaaggatacagcgcagtgaccaccaaaaaggccagagaagagagcaccagaatagttttattcgaatatttacccacccattgcccggcaaagggtcgaataacaatcgccgcaattaaaaataaagtcaccaacaaacctgctttatcaggagaggcatgcaagcggtcagagatataaattggcaacaatgttagtaaaacataaaagacgaagaaaataataaagctgatgatggttattgcccaaaaatccttcgtccataacttctctttcatactctaccgcctgtcaggatgacgcacgcagacaacactcccgttactgcggttgcgtcaaattgtgatgtactttgcagaacagaagtataaatggcggcatgctattagagaaattaatcgttttaatattattgattagcaaactctaatgactcttacccaaataaattctttactcgccgtgctggattacggtggctttactgaagccagcaagcgattgttcatgacacagtcggcggtaagtcaggcaattgctgccctcgaacaagaacttggtgtgaatatactgttacgcgatcgccgtaaagctatacaactgaccacagcaggtcaccgcattgtgcaacatctgcgcgccattaatcgggaagttaacgcagtaaaagagatagccgagcaggaaaagcagaaccctcaaagaacgctgagacttggttgtttccccagcgtctgcgcctgtatcttaccggttgtgattcgctactttgaaattcatcatccgaatataaaaattattccttttgaggaaaatagcacagcgattattgattcgcttcagaatgaatccattgatgccggttttgttcattttccggtgagcggaatgtactccgtgcccatttatcaggataaattcaccgtagtgttaccgcccaaccatgctctggcaaaaaacagcactattacagtggaagaattaatgggtgaaccattaatcattagtaaaggacgctatgaattaagcattatggcactatttaaagaaaagaatattaccccacagataaaatatgaatttaatcacccggatacagcgatcagttttattcgacagggattaggcatcgccttattaccagagttaacgctgaaaaccattgcagatgaattgtgttccgttcctctcgaaccaaccttctatcgacagatttcgttgctggctaaagaaaagccggtagaaggcagtccactgtttttactacaaatgtgtacggaacaactagtggtgagtggaaaaatttgatgtaagacatgagattgatgacaaatgcaagactgcctgattcgccacacttagttgtactatagcctttaccaggcgtaataattcgttttcacctgattttggcccactttgtgaattggcgatatatttatccagttgggagaagtgacaatgactccaggtagaaaccggtatgaagcgcccgactcactgtcaaaaccgattgttgagagtaatgacactccggcgaacagtacacagtttactctggagccattctcaatcttcaagtgggatacctaataacttgtcagggaagttatcaatatctgtttgttacttattaccgtatttattaacaataatgatactttctaacatgcgtaaaggtcttcgtaataaaatgagctaaatttgatagtga

SEQ ID NO: 1334 - DNA, 90 bp, Escherichia coli
  Strain O55:H7
tctgcaaagattaaattgtatcttgttaactcacaatacaaggaatcatttatgccaaatacatctattcacttatctcgctgtaatatt

SEQ ID NO: 1335 - DNA, 5675 bp, Escherichia coli
  Strain O55:H7
  modified_base (282)..(282): a, c, g or t
  modified_base (3196)..(3196): a, c, g or t
  modified_base (4298)..(4298): a, c, g or t
  modified_base (4870)..(4870): a, c, g or t
  modified_base (4874)..(4875): a, c, g or t
  modified_base (5250)..(5250): a, c, g or t
aataaattgcaaccagcagaaatttacaaagaatcacaacaaaccgccaaacttgagtttttttgcgatgagtttctaaaaatatctcaaagtagatacgggttatcaacctcaacagacagcatagctaatttattggcttttttcacgaaagcctcagatgcaattgatagtatcaagacccaaaaaattgacgttcacagttatggtttcgtaccaataagacattttgtcgaacatgtcataacgtataaaaatgaatttgcagcggattatgaaccntatacccttacctttacccgaggtgaaaacaacgaaggtattttgagtgtcgaaagcaaagaagggtttatttcacaaagaacaataaacttaaatgaatatgaaactgcaattaacatcatcaatgaacatgttataaaagaaaatatccacaacacggtccagtcaccgacagaaaaatacatttcaaaaataaacagctctgataaaccttataaaaccagcagtaaggaaagtattaaaagtcaactttacagcgatcaaagaaatatacagacctgctactacattctgagaaaaaatacagaatggtacaaatacgcatcctccgaggaacgctatgataaattcaagaattcttctaaggaaattaaaaatacctacaagcaaattgtacaagcgcagaaaaaattgaaccaaatgaaatacatcaataaattaagtggtgagcttatcgatatcaccgacaaaaagttagcaccattaataaatgatagtttcagctatacacgagatttctttgcttactcaaaacaggaaaaaaatatcttcacatttgataattctaagtttgtagatccaaaggaaaaagaaggtttaatggtacaacacagcaatgggcaactggttattactggtaaatattgccctgaaggtgtgcaaacagcattcacccaagaacaatatgataaattaataagatacattaatattttctttacctttccgaaattagaataatactttacagtataaactgcattacaatttattattgagacctattcatactgtttaaagaataacaatgcccagtgttagcttttttaacgaatgagttttacgaaaattatgttggcatcttttttacaggacgcaccggttaatgaaaagaataaccggtagtagcattatttcgctttagcagaggatggcgcatgaacgccatcctgcagtagcagcattactctttattaaggaatttaaccgctttatcagggaaatcagtaaacaacccatttacacccgctttgttatacagagcatcatataactgattcacatcagttgtgtattcaggcagtttatctgaccgcacggtataaggatgcactaccagcttgttctgctgagcatcttgcaccatgccagtgagtttgatattacccggctgcgatgtctcctcaatcaacatatggtaatccggaccaataccatctgcatattccgccacctgtttcatggcacccggcttaaacatccagtcgtagttgtaattaacccagcttccgtccggctgtttctgctgcgtttcattccagtcggtataggcaatcagctgtaccagattgagatccatgcccattttgggttccagctcattcttaatacgcttcagctcatcagcatcaaaacattgcaaataaactttatcgtctttaccggtgtaaccatatttcttcagcacttccagcgtttttgccgcaatatccttcccttcctgatgatggaaccacggcgctttgatttctggatagataccgatatttttcccggtagagtgatttaacccctgaacaaattcaatctcttcttcaaaggtgtgcacccggaagtcggacttacccattgggaaacgccctggataagtctgcacttttttaccgttttcaatatcgaaaccttcggtaaatttcaacgacttaatttcatccagcgtgaaatctatcgcgtagtaacgaccgtctttgcgcgcccgatccgggaaacgatcggcaacatcagtaacacgatcgaggtaatggtcatgcagaacaaccagatggtcgtctttggtcatcaccaaatcctgttccagataatccgctccctgcgcatacgccatcgcttttgctggcagcgtatgctccggcaaatatccactggcaccgcgatgggcgatgactattttttcgttgctgtccgccgccattgcactgcttcccatgactatagtgctcatcatgatcgccatgctaaggtttttcagcgtcaatttcatgccattagcctccgttgcgtttttgcagtaattcctgatggcgacgtttttcgccaatcatcacaacaatcaacaagataaccgctagaatgctgccgccaatcattaccataaagccgccatcccagccgaagaagtccacggtgtagccaacaatcgcgctcgccgccaccgaaccgcccaggtaaccaaacagaccggtaaagcccgctgccgttcctgccgcttttttcggtgccagttccagcgcatgcagaccgatcagcatcacagggccgtagatcaggaagccgataacaatcatacaaatcatatcgacggttgggttacctgccgggttcatccagtaaacgatagtcgcgatggtcaccagtgtcataaagaaaacgccggttgccccacggttgccacggaagactttatccgacatccagccgcacagcagggtgcccggaatacccgcatactcatagaagaagtaggcccaggaggatttatccagcgcgaaatgcttaacctctttcagataagtcggtgaccagtcgaggatgccgtaacgcagcagataaacgaacacgttggcgatggcgatataccacaacagtttgttcggcagcacgtactgcatgaagatttgcttcgcggtcagctcctgttccgctttttcgttatagtcgtccggataatcatttttgtactcttcgatcggcggcaagccacaggattgcggggtatcgcgcatcatcgcaaaggcgaataatgccaccagaatggcgcagaaagcgggcatatagagcgccgcgtgccagtcattgaaccaggccatccccagcaggaacagcagcggcggaataccaccaccgacgttgtgcncacagttccacactgacacaatgccgccacgttctttctgcgaccaccagtgcaccatagtacgaccgcatggcggccaccccatcccctggaaccaaccgcagaggaacaacagtacaaacatcaccgcaatgctcgacgtcgcccatggcacaaagcccataaacaacatcactgccgccgccagaatcaaacctgcgggcaggaaaacgcgcggattcgagcgatccgataccgaacccatgatgaatttcgaaaatccataggcgatcgagatcccagaaagcgcaaaacctaaatcaccgcgtgagaatccctgctccaccaggtaaggcatagcgagcgcaaagttcttacgaaccaaatagtaagcagcatagccaaagaatatccccaggaaaatttgccagcgcaatcgacgataagtcggatcgatctccgcggcaggtaagcgcgctttgtgtggcgctggtttaaaaatactcaacattgaaagcctccgtggcccgtggtcttatttatgattaacagcctgattcagtgagagaacctgccgtttcttgagttgccgcgatgttaagaaaacattcataaattaaatgtgaattgccgcacacattattaaataaggtttacaaaatgttcaaaatgacgcatgaaatcacgtctcacttttgaattatgagcgaatatgcgcgaaatcaaacaattcatgtttttactatggctaaatggtaaaaaacgaacttcagagggataacaatgaaaactcgcgactcgcaatcaagtgacgtgattatcattggcggcggcgcaacgggagccggaattgcccgcgactgtgccctgcgcgggctgcgcgtgattttggttgagcgccacgacatcgcaaccggtgccaccgggcgtaaccacggcctgctgcacagcggtgcgcgctatgcggtaaccgatgcggaatcggcccgcgaatgcattagtgaaaaccagatcctgaaacgcattgcacgtcactgcgttgaaccaaccaacggcctgtttatcaccctgccggaagatgacctctccttccaggccacttttattcgcgcctgcgaagaancagggatcagcgcagaagctatagacccgcagcaagcgcgcattatcgaacctgccgttaacccggcactgattggcgcggtgaaagttccggatggcaccgttgatccatttcgtctgaccgcagcaaacatgctggatgccaaagaacacggtgctgttatccttaccgctcatgaagtcacggggctgattcgtgaaggcgcgacggtgtgcggtgttcgtgtacgtaaccatctcaccggcgaaactcaggcccttcatgcacctgtcgtggttaatgccgctgggatctgggggcaacacattgccgaatatgccgatctgcgcattcgcatgttcccggcgaaaggatcgctgctgatcatggatcaccgcattaatcagcatgtgatcaaccgctgccgtaaaccttccgacgccgatattctggtgcctggcgataccatttcgctgattggcaccacctctttacgtattgattacaacgagattgacgataatcgagtgacggcagaagaggttgatattctgctgcgtgaaggggaaaaactggcccccgtgatggcgaanacgnncattttgcgggcctattctggcgtgcgcccgctggttgccagcgatgacgacccgagcggacgtaacgtcagccgtggcatcgtgctgctcgaccatgctgaacgcgatggtctggacggatttatcaccatcaccggtggcaaactgatgacctatcggctgatggctgaatgggctaccgacgcggtatgccgcaaactgggcaacacgcgcccctgtacgaccgccgatctggcacttccgggttcacaggaacccgctgaagttaccttgcgtaaagtcatctccctgcctgccccgctgcgcggttctgcggtttatcgtcatggcgatcgcacgcctgcctggctgagcgaaggccgtctgcaccgtancctggtatgtgagtgcgaagcggtaactgcgggtgaagtgcagtacgcggtagaaaatttaaacgttaatagcctgctggatttacgccgtcgtacccgtgtggggatgggtacctgccagggcgaactctgcgcctgccgcgctgctggactgctgcaacgttttaacgtcacgacgtccgcgcaatctatcgagcaactttccaccttccttaacgaacgctggaaaggcgtgcaacccatcgcctggggagatgcactgcgcgaaagcgaatttacccgctgggtttatcagggactgtgtggtctggagaaggagcagaaagatgcgctttgatactatcattatgggcggcggcctcgccggattactctgtggcctgcagctgcaaaaacacggcctgcgctgtgccattgtcacgcgt

SEQ ID NO: 1336 - DNA, 11238 bp, Escherichia coli
  Strain O55:H7
  modified_base (182)..(185): a, c, g or t
  modified_base (2198)..(2198): a, c, g or t
  modified_base (2231)..(2231): a, c, g or t
  modified_base (4278)..(4278): a, c, g or t
  modified_base (9936)..(9936): a, c, g or t
  modified_base (11202)..(11203): a, c, g or t
gcgctgcatttctcatccggttcgctggatttgctgagccatctgccagatggtcaagctgtgacagacattcacagtggactggaatctttgcgtcagcaggcacctgcacatccttactctcttctcgggccacaacgcgtgctcgatctcgcttgccaggcgcaggcattaatcgctgnnnncggtgcgcaattgcagggcagcgtagaactgcctcaccagcggattacgccgctcggcactctgcgctctacctggctaagttcgccagaagtccccgtctggccgctgcccgcgaagaaaatatgtgtagtgggaattagcggactgatggattttcaggcgcaccttgcggcagcttcgttgcgtgaactcgaccttgccgttgaaaccgcagaaatagagctgccggaactggatgtcctgcgcaataacgccaccgagttccgcgcggtgaatatcgcccgtttccttgataatgaagaaaactggccgctgttacttgatgcgcttattcctgtcgccaatacctgcgaaatgatcctgatgcccgcctgcttcggcctggctgatgacaaactgtggcgttggttgaatgaaaaactaccttgttcactgatgcttttgccaacgctgccgccttccgtgctgggcattcgtctgcaaaaccagttacagcgccagtttgtgcgtcagggtggcgtgtggatgccgggcgatgaagtgaaaaaagtgacctgtaaaaatggcgtagtgaatgaaatctggacccgcaatcacgccgatatcccgctgcgtccacgtttcgcggttctcgccagcggcagtttctttagtggcggactggtagcggaacgtaacggcattcgagagccgattctcggccttgatgtgctacaaaccgccacgcggggtgaatggtataagggagatttttttgcgccgcaaccgtggcagcagttcggtgtaaccactgatcagacgctacgcccgtcgcaggcagggcaaaccatcgaaaacctgtttaccatcggttcggtgctgggcggatttgatcccatcgcccagggatgcggcggcggtgtttgtgccgtcagtgctttacatgccgctcaacagattgcccaacgcgcaggaggccaacaatgaatgacaccagcttcgaaaactgcattaagtgcaccgtctgcaccaccgcctgcccagtgagccgggtgaatcccggttatccagggccaaaacaagccgggccggatggcgagcgtctgcgtttaaaagatggcgcactgtatgacgaggcactgaaatattgcatcaactgcaaacgttgcgaagtcgcctgcccgtccgatgtgaagattggcgatatcatccagcgcgcacgggcgaaatatgacaccacgcgcccgtcgctgcgcaattttgttttaagccataccgacctgatgggtagcgtttccacgccgttcgcaccaatcgtcaacaccgctacctcgctgaaaccggtgcggcagttgcttgatgcggcgttaaaaatcgatcatcgccgcacgctaccgaaatactccttcggcacgtttcgtcgctggtatcgcagcgtggcggctcagcaagcgcagtataaagaccaggtcgctttctttcacggctgcttcgttaactacaaccatccgcagttaggtaaagatttaattaaagtgctcaacgcaatgggtaccggtgtacaacagctcagcaaagaaaaatgctgcggcgtaccgctgatcgccaacggctttaccgataaagcacgcaaacaggcaattacgaatgtagagtcgatccgcgaagctgtgggagtaaaaggcattccggtgattgccacctcctcaacctgtacatttgccctgcgcgacgaatacccggaagtgctgaatgtcgacaacaaaggcttgcgcgatcatatcgaactggcgacccgctggctgtggcgcaagctggacgaaggcaaaacgttaccgctgaaaccgctgccgctgaaagtggtttatcacactccgtgccatatggaaaaaatgggctggacgctctacaccctggagctgttgcgtaacatcccggggcttgagttaacggtgctggattcccagtgctgcggtattgcgggtacttacggtttcaaaaaagagaactaccccacctcacaagccatcggngcaccactgttccgccagatagaagaaagcggngcagatctggtggtcaccgactgcgaaacctgtaaatggcagattgagatgtccacaagtcttcgctgcgaacatccgattacgctactggcccaggcgctggcttaaactcctttctgatgcccggtaagcatgtggttaccgggcatttttgcgtacacgattccgtgcccaatgtatgcgttgcaacgcagtgaaaattcctctgaaaacgtctcgcaaaggctgaaactggcagatgtcaaaggcctgggataaccgtaatgtcgcgtcatcataaatatcaggtgacggacaaccatgaccgaatcaacaacctcctccccgcatgatgcagtatttaaaacctttatgttcacacccgaaaccgcacgggattttctcgaaatacatttaccagaaccactgcgcaagctttgcaacctgcaaaccttacgcctggaacccactagttttattgaaaaaagtttacgcgcttactactcggatgttttgtggtccgtggaaaccagcgacggtgacggctatatctactgcgtgattgaacatcaaagctctgcagaaaagaatatggcttttcggctaatgcgctatgccactgccgccatgcagcgtcacctggacaaaggctatgacagagtcccgctggtggtgccgttgctgttttatcatggcgaaacctcgccctacccgtactcactcaactggctggatgagtttgacgatccgcaacttgcccggcagttgtacaccgaagcttttccgttggtggatattaccatcgtacctgacgatgagatcatgcaacatcggcgtatagctctgcttgaactgattcaaaagcatattcgcgaccgcgatttaatcggtatggtcgacaggatcaccacgcttttggttagaggcttcactaatgacagccagctacaaacactgtttaattatctgctgcaatgcggcgatacctcccgtttcacccgttttattcaggagattgccgaacgttcaccactacaaaaggagagattaatgactattgctgaacggctacggcaggaaggacatcaaattgattggcaggaaggtaaattagaaggtttgcaggaaggcatgcatgaacaagctattaaaattgccttgcgcatgctggaacagggctttgatcgtgacctggtgctcgcggccacccagctaagcgaagccgatctggcagcgaataaccactaattaacacagtcccacagccgatccccatgggcctttgatatcaataactaccttttatgcgtggcccatttttgcctgatttaaacatcgccagtcgttgatccagggcatcgctgtagagcatcgtgtcaacgccaacagcgacaaagttcgctccccacgccaggcattgctgcgccatatcaggagccacagccagaaaaccagccgctttacccgcagcacggatccgccgaatgctggtttcaataattcgctgcacttccgggtgcccggcgttatccgggtagcccaacgacgcagaaagatccgcaggtccaataaacacgccatcaatcccttcgacgtcgaggatctcgtccaggttatccagtgccgttttactttccacctgcactaacagacaaagcgaatcgttgacttgcgccatgtaattctcaatgcgtccccagcgcgcagcccgtgctacactggccccaacaccacgttcaccgtagggaggatagcgcgtggcagacaccacctgacgtgcctgatcggcagtatcgaccatcgggatcagtagagtttgcgcgccaatatccaggacttgtttaatcagcggtttactgccttccaccggacggatcacgggttggctggcatagggggctaccgcctgtagctggtgataaagatcctgaatggtgtttggcgcatgctccccgtcaatcagcaaccagtcataaccggaagtagcggcaatttctgccatataggcagtcgttgagcttaaccacagaccaatttgcacttcgcccttgcgtaaacgttctttaangggatggttaataatgcgttcatcgtgttccttaacctatttaatgatgtgccacgtcggtctgcgcaacggtgcgatttacacgcagagtgaaaataatcagcgaaccgatgaccgccaccgctgccagcgtcagtaatcccgccgcatcgctggcaaataacgtttctgctttcacgcgcaggatcggggcaataaacccgcccactgcaccaaacaggtttacaaaaccaatccccgcagccagcgccgtaccggaaagcagttgtgtcggcatcgtccagaacaccggctgcacggcaataaacccgatggctgcaacacacagcgctacgatcgccagtactggagaaagcagcccggacagaccaataccaatgcccgccgccagtaatgtcagcgctgcgacattacgccgttcgccggttttatcggaatagcgcggaataagccaggtcccaaacaaggccgcaacccacggaatggcggtgaccaccgacgctgtaaagcccacttttgttcccagcaatgccgcaacctgggtcggcaggaagaaaattaatccgtaaaccgccacctgaatggtcaggtagataatcgccagttgccagactcgcccattacgcagcgcatcgctcagccgagaagtcactttctgttgttcttcacttgccagttgattgataagcaacgttttttctagtttactcagaaaacgtgcctgctccggtgtgtcatcaagccaaaagaatgtgaataccccagcgccgactgccaacaatccttcaatcacaaacatccagaaccagccgggatgccccataaatccatgcatctccagcagcgcgccggaaagcggtgatcccagtgttaacgccagcggtgcgcccatatagaacagccccataatgctggcgcgattacgctgcggaaaccattgcgaggtgagataaatcataccagggaaaaatccggcctccgcagcaccaagcagagtgcgaactatcagaaatttcgcttcagtatcggcccatgccatggctgccgaaagaaatccccacagcagtgttgtcgtaccaatccaggttctggcccccagtttgcgcatcaaaagattcgccggaacacccagaaacgcatataccacaaagaaaatgcctgctcccagcgcataagcttcattactcaacccggtatcaatctggtaggtctgtttggcaaaaccgatattcgaacggtcgagaaacgccagcacatacagcgccaacataaacggaattaaacgcacacggtttttcttcaccacggcgtcaagcaaagcggtgctcataaaaagctccttagaatatgtgggcgttaccgttgtcacagcaacgcccggagtgattagtgactgtaggggcgtttcaaattgcagtcacgattgagttcgacgccaaaaccgggtttatcaagcactgatttatgaatacgaccattcaccggaaccggctcattgagcagaatcgggtcaaactgcggacgcatcgttgaacaatccggactggtcatcaggaattcgctgaatggcgtattagtgaaggtgatcaccgcatggtgggagtaaacagacgaaccgtgcggcaccaccagttgccccctggatttggcgattgcggcaatttccaccagcgtggttaagccaccgcaccagccaacatccggctgcataatgtcgataccggtttctgaaagcgtacgaaaagattgcagtgtgccgtggtgctcaccgctggtgaccatcattccgactggcgcgttgcgtttcagttcgcgataaccttcatactgctgtggcggcaggcactcttcgatccatttcaggttatagggcgcgcaagcgtgggccagtttggtcgcatagttcacgtcctgactcatccagcagtcgagcattaaccagaaatcctcaccgcatttttcacgcatatccgcgaccatagcggcatctttgcggatccccgcatcgccatcatgtggcccccagtgcgtcggcattttgccaccgataaagcccatctcttttgccagatccggacgcgcacctgtggcgtagaactgaatctcatcacgaacagcgccgcctaaaagtttataaaccggaagcccgaccactttgccgaacagatcccacagagccagatcgacacaggaaatcgtgttcatcaccaggccaccagagccggagtaatacagggtggcattgagcatttgatcatggatcagtttgatatcactgacacatttaccctcaatgaaacggttaaggtgtttttcgacgataaaacagcccatttcaccggctgtcgaaacagcgaatccggtctggccgttttctgcttcgacttcaacaaccaacgtgccaagaacgttaatgccaaatgactggcgtaactgctcgtaatcgcggtatttactcatcggggtggcaatatgatcgtctatccagtgattcgccccctggtcgtgataatcaccgccgccagcgcctttttctgctgtcgcaccgccagtaaaccaggcgcgaacctgtttaatttttggtagggtcatgatgttctccattgttatgaggcttgtaagtcaaagggacttttccatcccaacagacgtgaaatatccctggcgcaggcaatggccttgcccgccagataatcacggtattcttcattgatttgtaagcgggtaccgaccaccgagatcgcagcggtaagctcgttattggcgttaaacaccggcgcagcgacacaacggacatcggcgtaatcttcgccgttgtcatagctccagccctgacggcgaatacgcgccagttcttcgtgaagttgctgtggatgagtaatcgttgtgggtgtcgcctgctcccagaccagcccttcgataatactttgctgtacagttgcaggttgccaggcaagcaggcatttacctattccggagcgataaagcgaaaggctttttccttcatgtgaacgcacgctgatagtggctgatgactccactttcaaaatgtaataagcgctgccgttatcaataatccccaggtgacataacagcccggtggtatccatcagttgcgtcaaacgcggtcgagccagttcccggagatccatcttgcttaacgcatgaccggaaagctccaccagcttggtccacaaacaaaaattttcctggtgatcaaggctaagaaaacgctgacgcctgagttcattaagcagcaaataggccgtgcttttagggatccccaatgtgtcaatgatcgtcgcagcattacaggggccaatgcgggcaatcaaattgagaatatcaatagcccgtgtcagggcgggaactttgcttgattccaacatactggactccagtcttagatactggaatcagtctcgttgctcagggggagtaaaattgtgaagcgcatcaaatcccgctcctcgtccaacggactggagaaattacgcacaaatttgtgaatcagcgcacggattttttcttattgagtacaacaggttggacaagttttgccggagggggaatgtgccggtgcagtaaaccggcacagagtggcggaatcagacggataaggtcatggactcaacaacctcaatccagccatgctcactggcaatgtcctggccgtttaaccaacggcgtagcatattcagtgccatcattgcgcacacttcctgacggatagccaggctatagcgtgtagtgctgaaacgcacacgcagagctaaagtgccatctggcgtggctagcgcaaagttgagatgctcgttctcgaaacccgaaacagccagtgccagcccggcaaaatggttggctcgccgttctgtaatccagtgcgcagtttgcgccagggtttcttcctgtgaaggaaccacttcacacgccagcagtggagcacctgcgcgagaaagttgcaaagccaataaaccaccggtgaattgctcgctcaacgtcaggctgaactggcggttttgcaattcgcgactgatctgcgcgggcagtccttcggtgccttcgaaaatcacgctctgtccggcaacacgtttaacgtccagccacagtttttccatcgcctgttgctcgcttgccggtccggtgagtttcagttcgatgatcggcattgaggagcgatagcccattgttacgcccggcggcagttgtagagtgtccaggctttgtgccagatcgctttccgaacgaccaaaggtagttaaacgcagacaaaccggcggctgtggtaaagaaaaacgctcgcgcagacgcggcaggatttcgtgctcgaccatcaccttaaattctgacggtacgccgggagtaaagaacatcaggcaacgattaagctgcacggcaaaaccacaggcggtgcctaccgggttattgataaattcagcactggcaggcagctccgcttgtttacggttgctcgatgccattactcgtccacgttcgtggaaatagcgttccatctctttgagccaggcttcatgcagcaccaggccttcaccttttgctgtcgcagcggcgagtgcgcttaaatcatcgctggtcggtcccagcccgccgttaacgatcagcacatcggcgtgctgactacgttcgcgaagaatggtgactaagtcatcaaggttatcccccaccgtattgcggcgagataatggcaacccctgatgaaagaaaaaatcggccagccaggcagcgttagtgtcaacgatttgcccgtgtaacacttcatccccggtggatagcatttccacttttaacatggttatctcctgcttttgttatcgaatcactataacgcaaagggagataaggcgtagtaagaaactgaatggcgcgacagaatgccgcgccggaagggatcagaaactggcgttaaccccaacatacgggccgtcagccacggcgttgtcgcggttaccgtctttacccgacagattcaggtagcgataacccgcctcaatactgactggacgcataatggtgtaacgcgcgccagcattcgcttcctcataacttttaataccgctggagagtgaatccggagagtagtaatactcgccaaacaaacggaagctgttgccaattttccactgcaaaccacctcctaccgctgcggcatagccttcatcgccgtaattcgggttggtgtaaacgccttttccgccaacggtcgccattaacggcccgagaggcagattcaaccccagccccacgcccgcgacgtcaccgtcgtcgtcgttatgtgtccagttaccgcttaaagccaggcccgtcgattcagtcccaaaaccgacaccaatattggtgtattctttacccgcctggccgctgatgctcattgcattgaccgatgcagaaaccaacagcattccggccagacctgctagcgcaatttttttcattatcccctttcccacaagcaattaatcaaaattcccaaagctgcgggattgtactgcctggcgcagaggattcaatgagcgaaaaaagggatctagtcacttattgtaactaaatacttcttaaataattaaacgccgaaaaaataaacacagtttaccgatacacacaaaaataataataagtgcagttatcatcgcaaaaganattactgtcactttcacatatttctgagttaccgtattctcatggtttctttttatttataaggaatacccctgtgcgacaacggactattgtatgccctttgattcaaaatgatggtgcttatttgctgtgtaaaatggccgacgatcgcggcgttttccccggtcaatgggcgctttcgggtggcggcgtggagcccggcgaacgaattgaagaggctctacgccgcgaaattcgcgaagaactgggagaacagctgcttttgacagaaatcacgccctggaccttcagcgatgatattcgcaccaagacgtatgcagatggtcgcaaggaagaaatttatatgatttacctgatttttgattgcgtttctgccaaccgagaagtgaaaataaacgaagagtttcaggactacgcgtgggtaaaacctgaagatctggcgcactatgatttgaatgtcgccacccgaaaaacgttacgtttgaaaggtcttctgtaacaatgatgacagccattactggctgtcagattgaaaatttagtgattaacgaattccccatccagataaactttgcctttttccacatgcatgactaaaccatccagataatcaggtttaaatgtcgcatcacgcttatctttagcaatatatgtcaggcaatgattatgggtgaaaataacgatatttttatcaggcgctttgctttgtaagtccttaatcgcactataaatctcattaccgcactgaagaagtcgtttatctaccgtcaattttttacccgctgaaaaccaggtcgcggactgaatggtccggacggtattactggaataaagatcgaaatcagggatatcagcactaaaagcgttgcccagttcacgggcatcctgggtacctttaaccgtaatacctgttttatctgacaagcattgattggttgaacgatcgcaacgttcagcatggcgaaacaaaacgacaaccgggtgctgctgtgccagtctgcccagcgttttattgtcgatacgtggcaaaccattgctactccaggcggcatgagtacccagtccggcaattgcagcgagcgccagtaaaatgatgaaatatttttttgacttcaatgatgagcggcaaaaagctaacacgtaaactccacctatagacaagcgcaaccagacaattaccgtgaaattgagcgacatttctggcgataattagcagttggtgtaatattaaaaatcctacgatgctggcaaaatgcctcaaaattnngccaaatgcaaagcctaaataagaaaaaatataaa

SEQ ID NO: 1337 - DNA, 16300 bp, Escherichia coli
  Strain O55:H7
  modified_base (657)..(657): a, c, g or t
  modified_base (763)..(763): a, c, g or t
  modified_base (2590)..(2590): a, c, g or t
  modified_base (5056)..(5056): a, c, g or t
  modified_base (8208)..(8208): a, c, g or t
  modified_base (9192)..(9192): a, c, g or t
  modified_base (10142)..(10142): a, c, g or t
  modified_base (10845)..(10845): a, c, g or t
  modified_base (10980)..(10980): a, c, g or t
  modified_base (11271)..(11274): a, c, g or t
  modified_base (11936)..(11936): a, c, g or t
  modified_base (12335)..(12335): a, c, g or t
  modified_base (12377)..(12377): a, c, g or t
  modified_base (12437)..(12437): a, c, g or t
  modified_base (12606)..(12606): a, c, g or t
  modified_base (12609)..(12609): a, c, g or t
  modified_base (13741)..(13741): a, c, g or t
  modified_base (13797)..(13797): a, c, g or t
  modified_base (14799)..(14799): a, c, g or t
atttacgtctaatattagtttcttaaggttaagttaatattctatccttaaaatttcgctctaaatggcaaaatatacacaacactctttatagcaaatataagtggacaggtattcaatggcggaaggaaaagcaatgtcagaatttttgcctttttcgcgaccagcaatgggcgtggaggaactcgctgcagttaaagaggttctcgaatccggttggatcacaaccggtccgaagaatcacgcgcttgaacaagccttttgccagttgacgggaaatcagcatgccatcgcggtcagttcagccaccgccggaatgcatatcacgctaatggcgttggaaattggcaagggcgatgaagtgattacgccttccctgacctgggtttcaaccctcaatatgatttccttgcagggtgcaacgccggtaatggtggatgtcgatcgcgatacgctgatggtcacgcctgaagcgatcgaatcagccattacgccacgcactaaagccatcattccggtgcattatgccggtgcgccagcagatattaacgccattcgcgccattggcgaacgttacggcatcgcagttatcgaagatgctgcccatgccgtaggtacgtattacaaagggcgacatattggcgcaaaaggtaccgntattttttcatttcatgccattaaaaatattacctgtgcggaaggaggcctgattgttactgataatgaaaatattgcccgccagctacggatgctgaaatttcanggcctgggtgtcgatgcctatgacagacaaacctggggccgtgcaccgcaggctgaagtcttaacgccgggctataagtacaatctgaccgatattaacgccgcgattgccctgacacagttagccaaattagagcacctcaacacccgtcggcgcgaaattgcccagcaatatcagcaagcactggcagctctcccctttcagccattaagccttcccgcctggccgcacgttcacgcctggcatctgtttattattcgtgtcgatgaacaacgttgtggtatcagtcgcgatgcgttgatggaagcgttaaaagaaagaggtattggtaccgggttacatttccgcgccgctcacacacaaaaatattatcgcgagcgttttccctcgctgtcgttaccgaataccgaatggaatagcgaacgcatctgttctttgccgctgttcccggatatgactaccgccgatgccgaccgtgtcatcacagcccttcagcaactcgcaggacaataagccatgtttgaaatccaccctgttaagaaagtctcggtggttattcccgtttataacgagcaggaaagcttaccggaattaatcaggcgcaccaccacagcctgtgaatcgttggggaaagagtatgagatcctgctgattgatgacggcagtagcgataattccgcgcatatactggtcgaagcctcacaagcggagaacagccatattgtgtctattttgcttaaccgcaattacgggcaacattcagcgattatggcgggattcagtcacgttactggcgacttaattattacccttgatgccgatctccagaatccgccagaagaaatcccccgcctggtggcaaaagccgatgaaggttacgacgtggtagggactgtacgccagaaccgccaggacagctggtttcgcaaaacagcttcgaagatgattaaccggcttattcagcgcaccaccggcaaagcgatgggtgactacggttgtatgctgcgcgcctatcgccgtcatattgtcgatgcgatgttgcactgccatgaacgcagcacctttatcccgattctggcgaatatcttcgcccgccgtgccattgaaattccagtgcatcatgccgagcgtgagtatggtgaatccaaatacagctttatgcgcctgattaatttgatgtacgacctggtgacctgccttaccacaacgccgctacgtatgctgagtctgctcggcagcattattgcgattggaggttttagcattgcggtgctgctggtgattttacgcctgaccttcggaccacaatgggcggcagaaggcgtctttatgctatttgccgtgctgtttacttttattggcgctcagtttatcggcatgggattactcggtgaatatatcggcaggatctacaccgatgtccgcgcccgcccccgctattttgttcagcaagttatccgtccatccagcaaggaaaatgaataatgaaaaccgtcgtttttgcctaccacgatatgggatgcctcggtattgaagccctgctggctgccggttacgaaattagcgccatttttacccataccgataatcccggtgaaaaagccttttatggttcggtggctcgtctggcggcggaaagaggcattccggtttatgcgccggataacgttaatcatccgctgtgggtggaacgcattgcccaactctcaccagaggtgattttctctttttattatcgccatcttatttgcgacgagattttgcagctcgctcccgcaggtgcatttaatctgcacggttcgctgttaccaaaatatcgtggtcgcncgccgctgaactgggtgctggtgaacggtgaaacagaaactggcgttacattgcaccgaatggtaaaacgtgccgatgccggggccattgtggcgcaactgcgcgttgccattgcgccagacgatatcgctattacgctgcatcataaattgtgccatgccgcgcgccagctactggaacagacattacccgccattaaacacggtaatattctggaaatcgcccagcgcgaaaacgaagccacctgttttggtcgcagaacgccggatgacagtttcctcgaatggcataagccggcatccgtactgcacaacatggtacgtgccgttgccgatccgtggccgggtgccttcagctatgttggcaatcagaaattcaccgtctggtcgtcgcgtgttcatcctcatgccagcaaagcacagccggggagcgtgatttctgttgcgccactgctgattgcctgtggcgatggcgcgctggaaatcgtcaccggacaggcgggcgacggcattactatgcagggctcgcaattagcgcagacgctgggcctggtgcaaggttcacgcttgaatagccagcctgcctgcaccgcccgacgccgtacccgggtactcatcctcggggtgaatggctttattggcaaccatctgacagaacgcctgctgcgcgaagatcattatgaagtttacggtctggatattggcagcgatgcgataagccgttttctgaatcatccgcattttcactttgtcgaaggcgatatcagtattcattccgaatggattgagtatcacgtcaaaaaatgtgatgtcgtcttgccgctggtggcgatagccacgccgattgaatatacccgcaacccgctgcgcgtatttgaactcgattttgaagagaatctgcgcattatccgctactgcgtgaagtaccgtaagcgaatcatcttcccgtcaacttcagaagtttatgggatgtgtagcgataaatacttcgatgaggaccattctaatttaatcgtcggcccggtgaataaaccacgctggatttattcggtatcaaaacaattacttgatcgggtgatctgggcctatggcgaaaaagagggtttacagttcaccctcttccgcccgtttaactggatgggaccacgactggataaccttaatgcggcacgaatcggcagctcccgcgcgattacgcaactcattctcaatctggtagaaggttcaccgattaagctgattgatggcggaaaacaaaaacgctgctttactgatattcgcgatggtatcgaggcgttataccgcattatcgaaaatgcgggaaatcgctgcgacggcgaaattatcaacattggcaatcctgagaacgaagcgagcattgaggaactgggcgagatgctgctggcgagcttcgaaaaacatccgctgcgccatcatttcccaccgtttgcgggctttcgcgttgtcgaaagtagcagctactacggcaaaggatatcaggacgtagagcatcgtaaaccgagcatccgcaatgcccaccactgcctggactgggagccgaaaattgatatgcaggaaaccatcgacgaaacgctggatttcttcctgcgcaccgttgatcttacggataaaccatcatgaccaaagtaggcttacgcattgatgtcgatacctttcgtggcacccgtgaaggcgtgccgcgtctgctggaaatcttgagtaagcataatattcaggccagcatttttttcagcgtcggcccggacaatatgggccgccatctctggcgactggtgaagccacagtttttgtggaagatgctgcgctcaaacgcggcatcgctttatggctgggatattttactggcaggtacggcctggccaggtaaagagattggtcatgccaatgccgatatcattcgtgaagcggctaaatatcacgaagtcggcctgcacgcctgggatcaccatgcctggcaagcccgtagcggtaactgggatcggcaaacaatgatcgacgatattgcacgcggccttcgcactctggaagagattatcggtcaaccggtaacctgttctgccgctgcgggctggcgtgccgaccagcaggtgatcgaagcaaaagaagcgttccatttgcgctacaacagcgattgtcgtggggccatgccgttccgtccactgctcgaatcaggaaaccctggcactgcgcaaattccggtgaccttacccacctgggatgaagtgattggtcgggatgtgaaagcagaagattttaacggttggttactcaaccgcatcctgcgagataaaggcacgccggtttataccattcatgcagaagttgaaggctgcgcttatcagcataattttgtggatctcctcaaacgcgcagctcaggaaggcgtgacattttgccctttaagcgaactgttatcagagacgttgccgctcggacaagttgttcncggaaatattgccggacgtgaaggctggctgggttgccaacaaattgcgggtagtcgctgatgaaatcggtacgttaccttatcggcctcttcgcgtttattgcctgctattacctgttaccgatcagcacgcgtctgctatggcaacccgatgaaacgcgttatgcggaaatcagtcgagaaatgctggcatccggcgactggattgtgccccatctgttagggctacgttattttgaaaaacccattgccggatactggattaacagcattgggcaatggctatttggcgcgaataactttggtgtgcgggcaggcgttatctttgcgaccctgttaactgccgcgctggtgacctggtttactctgcgcttatggcgcgataaacgtctggctctactcgccacagtaatttatctctcattgtttattgtctatgccatcggcacttatgccgtgctcgatccgtttattgccttctggctggtggcgggaatgtgcagcttctggctggcaatgcaggcacagacgtggaaaggcaaaagcgcaggatttttactgctgggaatcacctgcggcatgggggtgatgaccaaaggttttctcgcccttgccgtgccggtattaagcgtgctgccatgggtagcgacgcaaaaacgctggaaagatctctttatttacggctggctggcggtcatcagttgcgtactgacggttctcccctggggactgacgatagcgcagcgggagcctgacttctggcactattttttctgggttgagcatattcaacgctttgcactggatgatgcccaacatagagctccgttctggtactacgtgccggtcatcattgccggtagtctgccgtggctgggattactccccggtgcactatacacaggctggaaaaaccgcaagcattccgcaaccgtctatttgttgagctggacgataatgccgctgctgtttttctccgttgctaagggtaaattgcccacctatattctttcctgctttgcacctttggcaatgctgatggcgcattacgctttgctggcagcaaaaaataatcctctggcgctgcggattaatggctggattaacatcgcttttggcgtcactggcattattgccacatttgtggtctccccctggggaccaatgaacacgccggtgtggcaaaccttcgagagctataaagtcttttgtgcctggtcgattttttcgctatgggcatttttcggctggtacaccttaacaaacgtcgaaaagacctggtcttttgccgcgctttgcccgctggggctggcgttgctggtaggattttcaattcctgacagagtcatggaaggaaaacatccgcaattttttgtcgagatgacacaagaatcacttcagccaagccgctatattcttactgatagcgtcggtgttgccgcaggtctggcatggagtctgcaacgcgatgacatcatcatgtatcgccagacaggtgagttgaaatacggccttaattatccggatgcgaaagggagatttgtcagcggtgatgagttcgcaaactggcttaatcaacatcgtcaggaggggattattacactcgtgctttcggttgaccgcgatgaagatatcaacagtctcgccattccgcccgcagatgccatcgatcgtcaggagcgtctggtgctgattcagtatcgtcccaaatgatctggctaacattagtctttgccagcttgcttagcgttgccgggcagttgtgtcagaaacaggcaacctgctttgtggcgataagcaaacggcgcaaacatatcgtgctgtggctgggactggcgctggcttgtcttggtcttgccatggtgctctggctgctggtcttgcagaacgtaccggtaggtattgcctacccgatgttaagtctgaattttgtctgggtgacgctggctgcagtaaaactgtggcacgaaccggtatcgccgcgtcactggtgtggggtggcgttcattattggtggcattgtgatcctcgggagtacggtgtaatgggcctgatatggggattattcagcgtcattattgcctcagttgcgcaattaagcctgggttttgcggcgagtcatctgccgccgatgacgcacttatgggattttatcgcggcgctgttagcttttgggctggatgcccggatactgttactcgggctgctgggttatctgctttccgttttttgttggtataaaacactacataaacttgcgctaagcaaagcctatgccttgctcagtatgagttatgtgctggtatggattgcttcaatggtacttcccggctgggaagggactttttcgctgaaagcactactgggagtagcctgtattatgagcgggttgatgctgattttcctgcccacgacaaaacaacgttactgagttttccctgccactttacactgccgttcccactcatcggggctataacagcttgcagagaggactttcaccgtatgcagcttttcacgattaatacaataaagcgcattctgcaaaggcgagagtaaatcccccactttcacggcgaagtcactcttcacttcggcgatcatttttatcgcgccgccagcatcgcagagcataagtacatgtctgttatcttgtttattgcagcacgattttttgaccagccattccattatattatcctgtttgctaagagttttcatatcaatttacagattaacagataaactctttatcaacggcaatggaatggcagaactgagaagtgaaacggagggttaattattgctgacgttgcacccactcttttagcgcctgacgtgaaattttaataccgccgtttttcagctccggcggcaaagtcagccaacgtaccggttgctgaaaacgggccagcttatctttcacccattcactaagatcaacgctctcgtggtcatactccatcaccgccaccggtcgatgaccaaactccttgtcggcaacggggacgataaacacctgcaaaaccgcaggatgtgcagcaattacgcgctcgacttcttccggctgaataccctctccgccactgaagaatagattgtctaaacgtccgacaatggtcagcttgccattatgcatctcaccgcgatcncgcgtagcgtaccagccttcgtcattaaccagtgaaaccagttgcccgttacgccagtaaccttctgccatactggcagcccgcagccacacttcattattaacgattttcacttcccgacccggcagcggcgaaccaacgtctgccaggccgtcggcttctttcgcacacaccgtggaggcaaactcggtcagaccatagccgcaaaagcaacgaatcccctgctcgcgcgcctgttccgtcaactcgaccgggatagccgcgccgccaagtaacaccgctttcagggaaacggaactgcggttaaccagcaaacgccagagttgtgttggcaccagtgaagcgtgagtacagcctgccagcatttgctccaatggctgtttatcacgcaccgtcatccgcgcaccagcgtataaccagcgccacataattccctgaccggagacgtgaaacagcggtaaagagagcaaccagtcatcgtgatcgccaaacggaatcagcgataacaccccttcggcactggcaagatgggcctgataagtatggacagcggctttcggcaacccggtagaacccgaggtcaacgtcattgagcacagacgcgtcggctgccacgtagcgacatgtgcgccttcaacccgctgaatgtgcagcgacgttaatgccggaaacgtgttttccccatccggcaccagcgcaaattgcagcgtcagattgggcagcaattcttcaagcaacggttgcggcagctgagggttcacgggcaacacccgcgccccgcattgcagtaacgccagccaggcgagcagcgtttgcggcgtattccacgcccgcaacatcacgccgctgccctcaaccacaccctgcaccgcaaatccggaggctaattcatcgacgcgagcacaaagctcgcgccagttgagttgctcgtcattaagacgtaaggcgatggcttctccccgcacttgccgccagtgacgccanggccagtcagagaagatcataacaaccgctccagtgcatcaacttccacgacaggcagcgtgctacccggccagcgacgtacctgctgcgcctgcattagatccagcgtgtccagccctggaatggtgtccggcgttaaccaggcagcaatccgcgccagttgcgttaagcctaagctcgattcaatggaagaactgatcactgccgtcagccccagcgcgtgcgccgcctgtacctgctcgcgaactttctccagactgcccgtgagcgtgggtttgataactaccgcgcgcacgccctcttcagccacaaaggcaaaatccggctcgcgcaagctttcatcccaggcaatggcaatgccggtttcacgggcaaacgctcgcgaatcatcgcgggttttgcacggctcttcgagaaacgcgatgcggtggcgataatccgggttaacgtatttggcaaactgctgacctttcagcggtgtccaggcgcgatttgcgtcaagacgcaaatgcagatccggaattgcctccagcaacagattcaccaccatgccgtcgcgcaccgcttcgtacaatcccactttgaccttcgccactttctcgcctggcatatctgcaagtttgaggatcagatcgtccggatcgccattacacagtggtgccgtacggtaattggccgcctgcgggagcgtatctgccagctccgccaatgcacaacttacgccaaaggcaacggaaggcatctgcggtaattcgcaatcgcctgccagccagttatttacccaggcaagcagcacactttgcgcctcttcccaggtttcctgactgaagcccggcagtggggagatctccccccacccttcgcgctcgccctcacgcaggcaaacgtacagcccgtcgcgggtttttaaccgcctgtcgcgcagaaccacccccgcgtccatggggatntgccagcggtatacctgcgcgctacgcattacggattccgtttgaatttgctgaagtcaggctgacgtttctggttgaaggcgttgcgaccttcctgaccttcttccgtcatgtagaacagcatggtggcgttgcccgccagctcctgcagacctgcctgaccgtcacagtcggcgttcagtgcagctttcaggcagcgcagcgccatcggactgttttgcagcatttcacggcaccagcgaacggtttctttttccagatccgccagcggtaccacggtgttgacaaggcccatatccagcgcctgttttgcgtcgtactgacggcacaggaaccagatttcacgcgcttttttctgcccgacgatacgagccatgtaggaagcgccccagccgccgtcgaaggaaccgactttcgggccagtctgaccgaagatggcattatctgccgcgatagtcaggtcgcacatcatgtgcagaacgtgaccaccgccgatggaatagccagccaccatcgcgacaaccggtttcggacaggtacggatctgacgctggaagtccagcacgttcaggtgatgtacgccggaatcatctttatagccgccgtaatcaccacgcactttctggtcaccaccggagcagaacgctttatcgcctgcgccagtcagaatgatcacgccgacgttatcgtcataacgcgcatntgccagtgcctggatcatctcttttaccgtcagaggacggaaggcattgcgcacctgcggacgattaatggtgatttttgcgataccgtcggtggatttttcataacgaatgtcctcaaagccttcggagcagtngtgccattcaaccggtgcgtaaagcattgcttcatcaggataaatcatattgtgtcctttagtcagaaacgcaagatctgcgccagacttgcgattacgccagcgggattttcccgatgcgcgttatgtccggcgcgaggaatgacatggcagtcggcagccagttccgccgccagggcgcggaatttgctgtcacgttcaccacataaataataaaacgcaaatgtgcgggcgctaaggttagcacgtaaatcaggctggacggcgagagaagtcgcctccagcatggcnnnnagggttgcgccattattgttgctgcgcagcaccaccagctcccggcgttgatcgtcattgagcgaggcaaaaacaggctgttgataccagtcggcaaataccgcggttaatggttcggaacgaaaacgctgcgcccattggcgatcggaacgctgacgttccgcgcgttgttcagcattttgcagccccggatgaccgccttcgacaacaaccccacaaagccccgccagcccctggcaagcggccatcatcgccacccgtccgccaagcgagtaccccaccagccagaagctaaggatgttgtaactaaccagggttttacgcagtaagtcggtgacatcatcaaatccatcgacgctaatcgccgccgaaccaccgtgacctgggagatcaacatacaaccgtgagtagtcggcaaacgcctcgccgacttcctgccattcgaggcaatcgccggaaaaaccgtgcaaaaacaccagccagggtaaacctggtttgccgtgttttgcctgcgcgtgcaggatcataaatggcttacctgcgccagcagctgctggagcgtttgcgcgccgtcggtgtcgttaaccaccatttcaattaccgtggtggtcggagtacgccaggcgtcggcaagtaccgtttcaagttcctgccagttttgnggacgatgatatttcagctcaaacatcgcggcagcgtgctcaaaatggacgttttgcggcatcagatagaaacgctcgcgctcgcttttcggcgttggcagcagcgagaaaatttgcccgccgttgttgttcaccacaattaataccagcggcgcggaaacctggcgcaataacgccagcgcattcaggtcgtaaagtgcggagagatcgcccacaatcgccagcgtcggtttgccgcttgcccgctgaacgccggcggcagtcgagagcagcccgtcgataccgctggccccacggttgctgtacaccgggtaacctgccggaagttgcgaaagcgcatcaatcagacgtaccaccaggctgttaccgacaaacaattgcccctgttcaggcagatantcgctgatgcgatgcgccagttgcgcttcgccaaacgcatcncgacaggcaataaccgcctgcattgcctgttccgccaggcgcgggatttcaacgcaccanggctggcgtttttctgccggatgcagttccagccagtcggcaatattggcaattaagcggcgtccacgatggtgtgccggatcaagccgcccttcgatgtcatccacaatccagtactcttcgggttcacagcttgcctgccattgcaggagccgtttgcccgtcaggntgnttcccagttgcaccacaatttgcgcctgttgcagttcgctggtcgctttggcattgcctaaccagagatcggcacacggcagcggctgtccggtttgcgacagcacgtcgccaatcagcggccagccaagagtttgcgcccacagggcaacttttttgccctcttccgcactcatgcgcccggcaaccaccacgccgcgcttttgccgccagaagaaccagtcgcgctgtttttcgctctcaagacgaggcgcttcacgcagccacggcttatcatcctgccaccagtcacccagacgctgttgccagctaagcccagtgtcgtccatctcgccatacagcggttcagcaaacgggcagttgatatggaccccaccagcatgaagcgtaccgagagcatggtcgatggtagaaaccagccaacgtgcggggatatcctgggtcgggcgcggcagtgaaatactgtgcgtggggtgagaggcgaacattcccggctgacgaatcgcctgattcgcgccgcagtcaattagctccggcgggcgatcggcggttaacaggatcagtttttctccggttaacccagcttcaatcagtgccggatagagatttgctaccgccgtgccggaggtcacaatcaccgccaccggctgcttgctgactttcgccagccccagcgccagatgccccagtccacgctcatcgaaatgggtgtggtgaatgaatgcggaattctccgccgccgctaacgttaacggtgtagaacgcgagccaggggcgatgcagatgtgtcttacgccgtgacgcgttaatgcttccagaatgaccgccgcccagcgtcggttaaatgcgcttactgacatgagtttgtccggtatcaatattgcggctaagtataaggagctacaaaaatagattattgatatgaatcggtaatgatgcgactcattactattccatttgtaataaagtacgcagccctgccgctttgttgtcgatttcctgccactcttgctcggggtcggaaccacggacaatgcccgcgccagcatatagccgcacgacattgccgctgatttttgctgagcgcagggaaacgcagaattcgctttgttgtaatgagagatagcccgcanaaccggcgtaccattctcgggtgaacggttcgtgatgggcgataaactgtcgcgcnagatcgcgcggtaagccagcaactgctgccgttggctgcaactgatgtaaacagatcacatcatccgctttgttgagtgaagtccagatacagcggcgaagatgctgcactttacgcagacgcagtacctgcggcggtaaaacatccagcgtctgggtatcggcctgtaatcgttggcagatatcttccaccaccagcatgttctcgcgctggtttttatcatccgccatcagccactctcctaactgctgcgcctgcttatcatcaggatgatttgctactgttcccgccagcgcttcagtacgcagcgctttgtcacgccgccgccataaccgttccggtgaagagccaagaaaagcattttcgccatcaaaggccatgtaaaaatggtagcaattgagattcagtcgacgactggcagccatcatcgccgccgcattgaccggacttgcgaaatgcaggtcagttgcccgagcaagcaccactttgtcgagctcaccttcggcgatggttttcgttgccagttcgattaattgcgtccagcccgttttgtccggccagtgttgttctcgcgtagtggttaaatgtaacccaggcaagggcttgatactcaccagtgtggcgataaattctcttgccttaatcgcatcgtgctgaagggagctttcgctgaatagcgtcagccgcagcgtggctttaccgccacagcgtcgccattccaggcgtggtaaaagtaaattgccctgcgacgggtcaaacgcattcagcccccaaatgcgtaagtcggcgtgttccgggtgctggcgaagaaaacgttgtgcctggtccaacgacgtaaaacgggtaatcgcgcccaggacggcagcttcttcatcaccattacgttgttgccagtagaattgcgggtacgtttgctgactggccagccagctcaaggcatcaaaagcgtctttgagagggaaaggaatatcgataacccgaatgccgggtgtcgccggaatntcttgcgacaaatggcgcagtagattttccagcgccgtagtaagtgattgcacgcggacctctccctgttaaaagcctcacattatacggggtactacaaaaaaaatgcagtaccccggtgtagggaggttttaacggcgtgccagcaacagtcctagtaccagcccaacggccgcacccacaccaattccctgccagggtttttcgtggacgtagtcatcagcacgataaacagcctgcttcgcccgatagtaataactgtctgaagcctggctaacccgttttttcacatcatccagcgctttttctgcacgcgctttcagctcaacatatttctgatcggcgggatcgccagaggagcggagcacctcttccagtgtttcactaagcagcgtcaggtcgtcatcgatacgtgtatcaccaaactgattagacattctcgttctccatttgcgtaaaacctgtcactaactatagacaagggttattgattacgcctgaattacctcgcgtgccatcccaatgtgtgggataccatcttcttcatagatctccgtcacagggataaaaccgaaactctggtagaagttttgcagatgcgcctgcgccccgaggtagacaggcttatcaggccagtgatgcgtgcaagtgtcgagggttttactcatcagttgctgccccactttttcgccacgcaacgcttcactgacaatcacccgaccaataacgaccggctcaagatcatcatcacttttcagaatcctcgcatatgccaccagttcatcatttttccaaccgagaatatggcgattatcccccgtcaaatcatcaccatcgatatcctgataagggcaattttgctcgacaacaaacaccgcgcaacgcagttgtaataaggcataaagctgggaaaccgataattcagagtgatgcagatcttgccattcaatcataatgctctccttttagatgtatgccttatactagccggaatattttttgaaacgtgatgaactcatggaattaatttttttaggtacttcggccggtgtgccaacccgcacgcgcaatgtcacggcaatattgctaaacctgcaacatccgacccagagcggactttggttgtttgactgcggtgaaggcacccagcatcagctactgcataccgcctttaaccctggaaaactggacaagatttttatcagtcaccttcatggcgatcatctttttggtttacccggcttgctgtgcagtcgttctatgtcaggcattatccaacccttaacgatttatggtccgcaaggtatccgtgaatttgtggagaccgcgctgcggattagcggctcatggaccgattatccgctggaaattgtcgaaattggcgctggcgaaattctcgatgatggcctgcgcaaagtgaccgcttatccaatggaacacccactggaatgctatggctatcgtattgaagaacatgataaaccgggtgcattaaatgccc

SEQ ID NO: 1338 - DNA, 44605 bp, Escherichia coli
  Strain O55:H7
  modified_base (601)..(601): a, c, g or t
  modified_base (2932)..(2932): a, c, g or t
  modified_base (3631)..(3631): a, c, g or t
  modified_base (3987)..(3987): a, c, g or t
  modified_base (6158)..(6158): a, c, g or t
  modified_base (12555)..(12555): a, c, g or t
  modified_base (12559)..(12561): a, c, g or t
  modified_base (13873)..(13873): a, c, g or t
  modified_base (14314)..(14314): a, c, g or t
  modified_base (15308)..(15308): a, c, g or t
  modified_base (15311)..(15311): a, c, g or t
  modified_base (15840)..(15840): a, c, g or t
  modified_base (16295)..(16298): a, c, g or t
  modified_base (17922)..(17922): a, c, g or t
  modified_base (18423)..(18423): a, c, g or t
  modified_base (19167)..(19167): a, c, g or t
  modified_base (23230)..(23230): a, c, g or t
  modified_base (23722)..(23722): a, c, g or t
  modified_base (24280)..(24280): a, c, g or t
  modified_base (26415)..(26415): a, c, g or t
  modified_base (27514)..(27514): a, c, g or t
  modified_base (27516)..(27516): a, c, g or t
  modified_base (29505)..(29505): a, c, g or t
  modified_base (31683)..(31683): a, c, g or t
  modified_base (33018)..(33018): a, c, g or t
  modified_base (35203)..(35203): a, c, g or t
  modified_base (37331)..(37331): a, c, g or t
  modified_base (38360)..(38360): a, c, g or t
  modified_base (38380)..(38380): a, c, g or t
  modified_base (38435)..(38435): a, c, g or t
  modified_base (38677)..(38677): a, c, g or t
  modified_base (40092)..(40092): a, c, g or t
aaagctgctggcgtaccgcctggcccactgtttcaggaattaaaagcgggcaaaacaatcatgctggaagatggaaggcagattaacggcgcagattacttagctgctccagtgccaggtaaagcgctcgctattttcggcgataccggcccctgcgatgccgcacttgacctggctaaaggtgtcgatgtcatggtgcacgaagcgacgctggatataaccatggaagccaaagccaatagtcgcggtcatagctctacacgccaggctgcgacactggcccgtgaggctggagtcggtaagctaatcattacccacgtcagctcgcgctatgatgacaaaggttgtcagcacctgttacgtgaatgcaggtcaattttcccggcgactgaactagcgaatgatttcaccgtgtttaacgtttaactctgcttattattaaaaacagggcgaaacttgccctgttatcgcaacccgcgctacatatatccactcacacgggcatattgagcgatttttgatatttattcatctccttacgcactatattcagagcaataagttgcctctttttatcttcattcagcacaacctttgcaantaaaaggagcatatgatggttacagttgtcagcaattattgtcaattatctcaaacccaactcagtcagacatttgcagaaaaatttactgtgaccgaggaattactgcagtctttaaaaaaaacagcgttatccggagatgaagaaagcattgagttactgcataatattgcgttaggttatgatgaatttgggaaaaaagctgaagatattctttaccatattgttagaaacccaacaaatgataccctatcgattatcaagcttataaaaaatgcctgtttaaaattatataatttggcacataccgcaaccaaacaccccctcaaatcacatgattcagataatctcctgttcaaaaaactattctccccttcgaaattaatgacaattatcggtgaggacattcctctcatatcagaaaaacagtcactttcaaaggtacttttaaatgataagaataatgaactgagcgatgggacaaacttctgggataaaaatcgtcaattaaccacagatgaaatagcttgctatcttaaaaagatcgccgccaatgcaaaaaatactcaagtcaattatcctactgatttctacctccccaattccaacagcacttacctggaagtcgctctcaatgataatattaagagcgatccatcatagccgaaagaagtccagttattccccataaatactggcggacactggatattagtttcgctacagaaaatagttaatgaaaaaaacaacacacaacaaataaaatgcatcatattcaattcattacgtgcactaggccatgaaaaagaaaattcacttaagcgtatcattaacagtttcaattgtttcaattgtgaccccacgagagaaacgccgaataataagaatataacagatcatttaactgaaccagagataatatttttacatgccgatcttcagcaatacttaagccaaagttgcggtgcatttgtgtgcatggcagcccaggaagtgattgaacaaatggaaagcaattctgacagcgccccctatacgttattaaaaaactatgctgacagatttaaaaaatattcagcagaagagcagtacgaaattgattttcaacatcgtctggaaaacagaaattgttatttagataaatatggcgatgcaaatatcaatcattattatagaaacttagaaataaaaaactcacaacccaaaaatagagcatcaagcaaaagagtaagttaacatcattgttaattaattcgaccagtcagcaaatatgctgactggtcgaacatagtttgctaaaaagtcatcactgactgatgtcagtcacaccacccgccagttcaatcttcgggtatttccagcgtatctcggcacgcgattgctggtctgttgatgtagtggattgttgttgctgacttttcttaccctcagatttctgccccctgtcaactcaatctgccaataaataacataattatatttttccttatatgaattcctttttaaaatagcgaagccactgtaaaagatactttttgtatagatctaacaaccgtaataaaacaaacactcataactcattataaataatgataaaataacgtcttttattgataatttacatatgaaaaaaattttccttttgttatattatttctgttttcactccctctgattattttttaccaaccctgggtcactgcattatcgccaacgccccgacacgtaattcctgagcaattagaaaaaacagttcgttatcttacacaaactgtgcatccacgtaatgccgacaatattgataatctgaataggtccatagagtatataaaaaaaggtctttgtcagtagcggtgccagagttaccgcgcagggcgtccccaattggctattacgactctgcgcctggtagccaggattacccttacccgcaatgtcctggctttatcccgatcggggggactttattgcctggtcggcagaatacaggatatcaacgccgttcgtcaggtaaaaacggcattgttatcatcccgggatttatctgtttattctatgaatgccccatggtttattcacggtattgatttctctgaccaccttaattattggcaacacgatattctcgccgtaatgattactgacaccgctttttatcgtaataaacaataccacttgcccggtgatacagcagacagattgaattatcagaaaatggctcagatggtggatggtgttataactttgttacacaacagtaaataataaaaatttctcgaggcgggtccagaaacagcgacatgtacattttattttccctcgtctgttttnagatgcgaaacataaaattcaatggaggaaaaataaatgggaatgattggttattttgcagaaattgactcagaaaagattaaccaactgcttgagtctactgaaaaacctttgatggataatatacatgacacgctttcaggattacgccgactggatattgataaacgctgggattttttacactttgggctgacaggcacctctgcgttcgatccagcgaagaatgatccgctgagtcgtgccgtgcttggtgaacacagcctcgaagatggtatagatggtttcctgggattgacatggaatcaggagttagccgcgacaatcgaccgactggaatcactggatcgaagtgagctgcgtaaaaagttttccattaagcgactcaatgaaatggagatttatccgggagtgaccttttcagaagagttagaggggcaactctttgcttcgatcatgcttgatatggaaaagctgattagcgcgtatcgacgtatgctgcgacaagggaatcatgcgctgacggttattgttgggtgatggtgtcagggcaccaaaaaaaaccgccgaacatgtcggcggctttctgacttacaaactgatagcttacatcagcggcattgctaaccgcacaatactaatcagcggttgtggccatacacccagcaccagtaccaacagtgcagaaatcagcaccangataccgcccgcgctgtactgccagtttgacggtgcatcgcgacccggttgttccggtgcgtgcaggtacaggctcaccgccacgcgcaggtagtagtagaggccgattgccgaaccgacaaccacggcacccaccagccaccacaggtgtgcctggacaccaaccgccagcacgtagaacttaccgataaagcccagcgtcatcgggataccggccagagacagcatcatcaccgtcatcaccgccgcgaggatcggacgatgccagaacagaccgcggtaagagaacagggaatcagcatccgggccacgatacgggctggacatcaggctgaccacgccgaacgcgccgaggntgctgaacagataaccggccaggtaaacccctaccgcttccatcgacatctcgccagtttgcagcgcaatcagcgccaccagcagatagccgaggtgagagatagatgagtaaccgagcagacgtttgatattggtctggctcagcgccatcaggttaccgaagatgatggaggcaaaggcgataatcgccagcaccacccgaatcgcttcgctgtcacccaccggtgcgtagaggaacagacgcatcaccacaccgaagatagcgattttgctcgccgtcgccaggaaagtggaaaccggcgcaggcgcgccctggtatacgtctggcgtccacaggtggaacggcaccagagagagtttgaagccgaggccaacaatcatcaggccgaaacctgccagcaacagcggctcgtttagcataccgtcgccgaggtttttacccagcgcgacaaacgacaggtcgccagactgcgcatacaccagcgccataccgaacagcaggaaagaagacgctgcggcagaaaggatggtgtatttgatactggcttccagcgaacgtttctggcggaaagcgtaaccgaccaggccaaacagcggcaaagagatcagttcaataccgaggaacagagacgccagatggtttgcattcgccagcaggatcccgcccagcgcggcaattaacaccaacaggtagaactcatccttgttgtcgttatagccttcaagccacgggtaggcgaaagtacaggtggcgaggctcgccaacaataccagcccggtgtaaagcatggcgaaaccatcaacgcgcatcagcggcgtaacgtccatagcgcccgcctggccaacaaaccagagcgaaaccagcgccgcgttaagcccaataaccgagagcgtagcgttgaggaaatgattgcgtcgccacgcaatggagagcatcacaaccaccaccgtcaagccgacgatcagcaacggtagcagtgcgatcaggttttgtggagttattgtcatggcgatttacggccttgtagtagtaacggaattaacaaaccactgctggatattgccaatcgcggagtgcgaggtatccagaatcggctgcggatagaagcccagcagtaccagcagcaccaccagcaacaggatcataaacagctcacgcagcgacatccctggcagttcctggctggcaatctggcttttcgctttaccgaagtaagcgcgatgtaacatcgccagcgaataaacagatgcaaagaccagcccaaaggtagagataacggtaatcaccgggacaacctggaagctgccgaacagaatcataaattcgccgacgaagttaccggtgcctggcatcccgagcgttgccaccgcaaagaacagtgacaaggctggcagccatttcatcttgctccacagaccgcccatcatgcgcatgtcgcgggtatggatacgttcataaagctgaccacaaagaataaacagacccgccgctgacaagccgtgcgcaatcatctggattaccgcgccctggtaggccaactggctgccggtgtagatagcaatcagtacgaagcccatgtgggaaaccgaggtgtaggcgatcagacgtttgatatcggtctgggcgaaggccatccacgcaccgtagaagatgccgataacacccagccacatggcgattggcgcgaactctgccgacgcgtttgggaacagcggtagggagaaacgcagcagaccgtaagcggcggttttcagcaagatccccgcgaggtccacggaaccggcggtcggtgcctgtgagtgcgcatccggcagccaaccatgcagcggaaccaccggcattttcaccgcaaacgcgatgaagaagcccagcatcaacagatattccacaccactggacattggcgtattcagcagctcttcatagttgaaggtccagacgccggtcgcattgtagtgaacaaaaaccagcgccaggatggcgatcaacatcaccagaccactcgcctgggtgtaaatgaagaacttggttgccgccgtgatacgcgttttaccatcagaggctttatgcccccacagtgcgatcaggaagtacatcggcaccagcatcatttcccagaagaagaagaacaggaacatgtcgatggcaaggaacacgccgataacgccncccaggatccacatcaggttgaggtggaagaagccctgatatttttcgatctctttccacgaacagagtaccgccagcacaccgagcagaccggtcagcacgaccatcagcagcgacagcccgtcaatggcgagatggatagagataccaaaacgcgggatccacggcatgtcgaattcagactgccactgcggaattccggcggattgcgtcagtgaataaccgccctgcaaccacagttgcagcgacagcgccagcgtcaatcccatggtgatcagcgcgatccagcgcggcaccttgacgccaaagcgttcggtctgccagcacaggaagccgccgataaaggggattagtattaaccagggtaataacatagctaagtatgtcccttatatttactcctgctcaggctatctcactcgtcagcccgaatcccggcagtgctcgcaatcctcacgtacttaagtacgctccggttgctgtgcgctggcggtatccggtctgacttcgccgatgacgcctgtacttcaggaacagttacctaaaatttattcttagttcacagacccggcgcaacgccgggtatattcactcagccaacaactcaacgcagtaccatcaacagtgccagcaccacgaccgcaccgatgctcatggatgccacataccagcgcagataaccgttctcgcttaacagcaggcctttacctgcaaagcgggaaaggacagccgggatgttcatcattgagttcagcggatcgcgtttcagcaaccaggcaatgcccaggaacggcttgacgaacactttgtcgtacagccagtcaaagccccaggcgttgtaccaccaggtgcccagcagacggcccggcgcactgttggcgatggaggtcaccagagtacgtttacccagccacagccaggctgccagcagaatgccgaccaccgcgaccacgccagaggtaatttccagggtcaacatgctgccgtgcgccagttccgtcgtttgcggaagcacgccctgcagcggcggtacaatcagtgcgccaacgaaggtggaaaggatcagcagcacaatcagcggcaggctgtgagttacccctttcacggcgtgagcgtgaatttgttcttttccgtggaagacgatgaaaatcatacggaaggtgtagagcgaggtcataaacgcaccgaccagacctgccaccatcagattgatatgaccattcgccatcgcacccgcgaggatctcatccttactgaagaagcccgcagtgactagcggcagtgccgacagtgctgcgccgcccaccaggaagcagagataaaccagcggaatagatttacgcagaccgcccatcttgaagatgttctgttcgtgatggcaggcgagaatgacggaaccggatgccaggaacagcagcgctttaaagaacgcgtgggtcatcaagtgaaaaatcgccgcatcccatgcctgcacgccaagcgcgaggaacatgtagccaatctggctcatggtagagtaagcgagaacacgtttgatgtcggtctgtaccagcgcggcaaaaccggccagcagcagcgtaaccgccccaacaatgcccaccagatgcagaacttccggcgtcatcaggaacaggccgtgggtacgggcgatcaggtagacacccgcggttaccatcgttgcggcgtggatcagcgcggagacaggcgtcgggcccgccatcgcgtcggcaagccatgtctgcaacggcaactgcgcagatttaccgaccgcaccgcccagcagcatcagcgtcgcccacatcagcatgttattgccgtcagcaaagtgcgctggtgccagttccaccatttcgcggaagttcagggtgcccagttcgttgtaaagaatgaacagcgcgaaagcgaggaacacgtcacccacacgggtcacgacgaacgctttcattgccgctgcgccattcttcggatcggtgtaatagaacccgatcagcagataggagcacaggcccacgccttcccagccgaggtacatcagcagcaggttgtcggcaagcaccagaaccaccatgctggcgataaacaggttggtgtaagcgaagaagcgagagtagccctcttcaccgcgcatataccaggaggcgtacatgtgaataaggaaacccacaccagtgaccaccgagagcatggtcagcgacaggccgtccagcaccaggttaaaaccgatgttaaagtcgcctaccgacatccacgtccacagcggctggctgtatgcctgctcgccgttagcgaagaagtcaacgccaataaaggcagttaccagcgccgccaggcccacagagccaacgccgacgatcgccgagacgttttcagaccagcgcccacgggagaacgccagcaggacgaagccaatcaatggcaaaataatggttaaggcaagcatgttcatccgcgcatctcacttactgaatcgatgttcaggttctggcgacgacggtgaagttgcagcagcagcgcaaggccgatactcgcttctgccgccgcgaggctgatggcgagaatgtacatcacctgaccgtcggtctggccccagtaacttccggcgaccacaaaggccagcgcggaagcgttaatcatgatttccagaccaatcagcataaacagcagattgcgacggataaccagaccggttaagccaagaacgaataagattgccgcgaggatcagtccatgttgtaaggggatcatgcgtgctcctccgtttttcttttcgcgctgccgtctttacgattgctcagcacttcacccgcacgctcttcacgaccgacgtggaaggccacaaccagacccgcgagcagcagcatagaagccagttccaccgccagtacgtaaggcccgaacagcgtaatacccactgctttagcactgattggcgtaccgtcgataccttgatcgttaacaccgagaatggcgtaaacaatcaccaccaacatgatggctgacaaaattgccggaccaatccacacctgcggtttcagccactggcgttcttgttcgatttctgaaccgcccaggttgagcatcatcaccacgaacacgaacagcaccataatggcacccgcgtagacgataatttccagcgcaccggcgaagtaagcgcctagtgagaagaacaccccggaaatcgccagcagcgaaataatcaggtacagcagtgcgtgtaccggattggtatgggtgatcactcgcaaggtcgcaagtatggctatcaggccacagatataaaaagcgaactccattgcccctctccttacggtaacaggctcttgacgtcgataggcttggcttcgttctctgcttcgcccttatctttgccgtcgattgccatacctgccatccggtagaagttatactccgggtatttgcccggaccggagatcagcagatcctctttctcgtaaaccagatcctggcgcttgtattcccccatttcgaaatccggggttaactgaatcgccgtggtcggacaggcttcttcgcacaaaccacagaaaatgcagcgtgagaagttgatgcggaaaaattccggataccagcgaccgtctttggtttctgctttttgcagcgagatacagccgaccgggcaggctaccgcgcagaggttacaggctacgcaacgctcttcgccgtccgggtcgcgggtcagaacgatacgaccacgataacggggcggcagatagaccggctcttccgggtacattcgcgtttcgcgtttggcgaacgcgtgcaggccgatcatccagatactacgaacctgggtgccgaaacctactaacaattcttttaaggtcatggtcttattgccccttattgcgcctgccagagaatgacagccgccgttaccagcaagttgatcagcgtcagcggcaggcagattttccagccgaaggacattacctggtcataacgcggacgcggtaacgacgcacgaatcaaaatgaacatcatcataaagaacgcggttttcagcgcgaaccagatgaatggcggtaacaacgggccttgccagccaccgaagaacagcgtcaccatcaatgcagagatggtcacaatcccgatgtactcacccacgaagaacagaccgaacttcataccggaatattcaatgtggtaaccatccgccagttcctgctcggcttccggctggtcaaacgggtgacggtgacacaccgccacgcccgcgatggcaaaggtaataaaaccaaagaattgcgggatgacgttccacacatgcgcctggctgttgacgatgtcggtcatgttgaatgaaccggcctgcgccaccacgcccatcagggaaagcccgaggaacacttcgtagctcagggtctgcgcagaagcacgcatcgcaccgagcagcgagtatttgttgttacttgaccagcccgcaaacagcaccgcgtaaaccgccagaccggccatcatcaggaagaacaaaatcccgatgttcaggtcggcaaccacccaacccggactgactggcacaatcgcaaaggccagcagcagcgaggtaaaggcaatcatcggtgccagggtaaagatgacgcgatccgagaatttcgggatccagtcttctttaaagaacattttgatcatgtccgcaaccagctggagcgaaccaccccagccaacacggttaggtccgtaacggttctggaacagacccagcaggcgacgttcgccaaagctcatgaatgccccgcaggtgacaaccaccagcaggatcaccaccgctttgaggatggtcagcaggatctcaatcagttccggtgatatccaactcattgttgtgcctccttgagatcctcaagatgcgcgccagccagcaccggagcaatgccggacatacccatcggcaagcccacctgccctgccgtcagcccttcagcgatttcaaccggcagagtgaccgtgttgccatcgtaactaaaggagacgcgtgtacctgcgtttacacccaacttcgcggcatccgctgggttgagtttgatgtacggctgcggcatacgacactggaagaccggagcacgctgtgacaattcatcgctgccaaacaggtggtagtacggcgcgatacgccatttcccgtcctgcggctggaagcgtgccggtacgctggtgaagtaatccagaccattttcgctggtttcaaacagacgcacacccggatcgccaaagcgcagtttgccgcccacttcgtcctggaatttgttccacgcctgcggggagttccagcccggagcccaggcaaacggcacttgcgaacggtgcgcggtcggctggttgttaccttccatcgagaaggtgaacatggtgtcaatatcctgcggctgacgcggctcatgaacgctgatattggcgcgcatggcggtacgaccgctgtaacggtgcggttcacgggccagtttctgcccacgaatacggaatgtcgcatctggcgcagcatctttgatacccgccagttccgggattttcgccacaacagcgtcaattacatggtcgagctgcgtccagtccacttcacggctcagcaaggtgctgtgcagcgagtgcagccagcgccaactttccagcatgacagttttgctgtcgtaataagccggatcgtaaacctggaagaaacgttgggcgcgaccttcattattaattaccgtaccgtcgctttcagcaaagctggcagcggaaagcaccagatgggcgttttccatgatcgctgtgcgttgatggtcaaccaccatcaccagcggcgctttagccagcgcagcattcacgcgggtagcagaagcgtgacgatgcagatcgttttccagcaccaccaccgcgtcggcgcgtccggtttccagttcggttaacgcttcttcaagcgatccaccgcccataatgcccagccccatgctgttgacggaacgggcaatcatggtgataccgacgtcagcgccgcgacctttcagggctttcgcgacgttagccgcagcctgaatcacctctaagctaccggcgttcgtcccggagataatcaacggtttcttcgcacccgccagtgcctgcacgatgacgtcgattttgctttgcagctcaggttcaataccgtcaaccgctggcgcagagttatccagcgcatgggcgatggcaaaacctaaacgcgcctgatcttcaaccggtgcgcggtaagtccacgccgcgatatcatccagacgggtgtcatcaacgttggtaacaaacagcggatgcttagcacgttgaccgatattgaggattgccgcaatctgccagtcagccactttctgtgctgccgccatttcgcgcgctttacctttcaccgcctggcgcactgccagcncgannngcgcgccggtctgggtaacgtcttcgcccagcaccagtaccgcatcgtaagattcgatttcgcgcagagccggagtataaatgccgccttcacgcagcactttcagcgccagttgcagacgttcctgctcaccgtgagcgataccggtgtagaagttttcttcgcccaccagttcacgcagcgcaaagttgctttccacgctggcacgcggagaaccaataccgatcactttcttcgactgacgcagaatatctgccgcgccctgcattgcctgttcggcgttgagggtaatgaaatcatcgccacgacgctgtactggctgacgcggacgatctttcaggttgacgtaaccgtaaccgaaacgaccacggtcgcagaggaagtagtggtttaccgtaccgttgtaacggttttcgatacgacgcagttcgccataacgctcgccggggctgatgttacagccgatggaacattgctggcagatgctcggcgcaaactgcatatcccatttacggttgtaacgctcggagtgcgttttgtcggtaaatacgccggtcgggcaaatttcgaccaggttaccggaaaattcgctttccagcgtgccgtcttccgggcgaccgaagtagacgttgtcatgcgcgccataaacgcccagatctgtaccgtcagcgtaatctttgtagtaacgcacgcagcggtagcaggcgatgcagcggttcatttcgtgagagatgaacggccccaaatcctgattacggtgggtacgtttggtgaaacggtagcgacggaagctgtgtccggtcatcacggtcatatcctgaagatggcagttaccgccttcttcacataccggacagtcgtgcgggtggttggtcattaaccactcgaccacactttcacggaactgtttcgcttcttcgtcgtcaatggaaataaaggtgccatcggaagccggtgtcatacaggacatcaccaggcgaccacgcgtgtcttccgcgttttggtattgcttcaccgcacactggcggcaagcaccgacgcttcccagcgccggatgccagcaaaagtaaggaatatcaaggcccagagacagacaagcttccagcaggttgtccgctccgttgacctcgtattctttgccgtctacatgaattgtagccattagcatgcttccagttttctcagtcagagactgagcgttaatcgaaattcggttaccagcgctctttcagcaggttcggctgaatcccattaatcaaatgggtattgctgaacggctgtttgatccccgcctcaaattcttcgcggaaanatttgatggcgctctgtaacggctccactgcaccaggtgcgtgggcacagaaagttttacccgggcctaagaatcgacacagttgctcaagtgtttcgatatcgcccggctgaccttcgccacgctccagcgcacgcagaattttcacgctccacggcagaccgtcgcggcacggcgtacaccagccgcaggactcacgggcgaaaaactcttccaggttacgcaccagcgacaccatgttgatttcatggtcaaccgccatcgccagcgccgtacccagacggctgcccgctttaccgatactttcgaattccatcggcaggtcaaggtgcgcttcggtcaggaagtcggtgcccgcgccgcctggctgccaggctttgaatttcagaccgtcacgcataccaccggcgtaatcttcgaggatctcgcgtgcggtggtgncgaacggcagttcccacagtcccggatttttcacccgaccggagaagcccatcagcttggtgccagcatctttacttttcgagatgttctgataccactccacgccgttagcgaggatcgccggaacgttacacagggtttcgacgttgttgacacaggtcggtttgccccatacgccggaggttgccgggaaggggggtttcgagcgtgggttagcacgacgcccttccagggagttgattaacgctgtttcttccccgcagatgtagcgccctgccccggtatggacgaacagttcgaagtcgaaacctgttcccataatgtttttgccaagcaatcccgcttcagtcgcttcggcaatggcgcggmgcagatttactgccgcttcaatatattcgccacgcaggaagatgtagccacggtaagctttcagcgcaaacgcggagatgagcataccttccaccagcaggtgcggcagttgctccatcaacaggcggtctttataggtgcccggctccatttcatcggcgttacacagcaggtaacggatgttcatggattcgtctttcggcatcaggctccacttcaagccagtcgaaaagcccgcgccgccgcgccctttcagaccagcgtcttttacctgattaacgatttcgtccggagacagcccggtcagcgccttacgcgccccttcgtaaccgtttttgctgcggtattcgtccagccacactggctgtttgtcatcgcgcagacgccaggtcagcggatgcgtttcgggagtacggataatgtttttcatttataccgctccagcagttcagggatcgcttccggggtcagattcgcgtgagtgtcctcatcgatcatcatgtttggccctttatcacagttccccaggcagcaagttggcagcagcgtaaagcggccatcaaatgtcgtttgccctggtttgatgttcagctttttctcgagcgccgcctgaataccctgatanccnttgatatgacagaccacgctgtcgcaataacggatcacatggcggccaaccggctggcggaagatctggctgtagaacgttgccacgccttcgacgtcgcttgccggaatacccagcacatcggcgatcgcgtggatcgcaccatccggcacccagccacgctgcttctgaacgattttcagcgcttcaatggacgccgcacgcgggtcttcgtagtggtgcatctcgtgctcgatcgcttcacgctctgccgcactcagctcaaaagcctcggtttgtggttgttgattctcgtgcataattagcggtccacatctgacataacaaaatcgatactgcccagataaacaatcaggtcagacaccaggctgccgcggatcgccgccggaatttgctgcaaatgcgcataactcggcgtgcggatacgagtgcgataactcatggtgctaccgtcgctggtcaggtagtaactgttgatccctttggtcgcctcaatcatctggaaggattcattggcaggcatcaccgncccccacgacacttgcaggaagtgggtgatcagggtttcgatatgttgcagcgtgcgctctttcggcggcggcgtggtcagcgggtgatccgctttgaacgggccttccggcatgttgttgaggcactgctcaagaatgcgcagactctggcgcagctcttccactttaagcattacgcgggtgtagcagtcagaaacaccaccaccaaccgggatttcaaagtcgaagttttcatagccagaataaggacgcgccttacgcacgtcgaagtcgatcccggtagcacgcaggcccgcgccagtggtgccccactccagcgcctctttcgcgccataggcggcaacgccctgggaacgacctttcagaatggtattttgcagcgccgctttctcgtaagacgccagacgtttcggcatccagtcgaggaactcacgcagcaggcgatcccagccgnnnngcaggtcgtgcgctacgccgccaatacggaaccacgccgggtgcatacggaaacccgtgatcgcttccaccagatcgtaaattttctgacgatcggtaaaggcgaagaacacgggcgtcattgcgccgacgtcctgaataaaggtcgagatatacagcaggtggctgttgatgcggaacagttcggagagcattacgcgaatgacgttaacgcgagccggcacggtgatcccggccagtttctctaccgccagcacgtaaggcatttcgttaacgcagccgccgaggtattcgatacggtcggtatacggaatgtagctgtgccaggactggcgttcgcccattttctccgcaccacggtggtggtagccgatgtctggtacgcagtcgacaatctcttcgccgtcgagctgcaaaacgatacggaaagcaccgtgcgccgacgggtggttcggaccgaggttgaggaacatgaagtcctcgttttcggtgccgcgcttcatcccccactcttccggtttgaaggtcagggcttccatctccagatcctgtttggctttggtcagctcaaacggcgagaattcggtagcgcgcgccgggtaatctttacgcagcgggtgacctttccaggtttgcggcatcatgatgcggcgcaggttcgggtgaccgtcgaatgtaatgccaaacagatcccaggtttcacgctcataccagttagcgttcgggaacagtttggtgaaggtcggtacgtgcaggtcgttttctgccagcgccaccttcagcatgatgtcgcggttacgatcgatagaaatcagatggtagaaaacggaaaaatccgcggcaggtaacccttcgcggtgcgtgcgcagacgttcgtccatgccgtgtaagtcaaacagcatgacgtaaggtttcggcagtttctttaagaaatcgccaacttccagtaattgttcacgcttgatccacacaacgggaaccccggtgcgagtcgcctgaacagtaaaggcatccggcccaaaacggttgcgcagttcgccaattaccggatcatcaagatgatcgcgggtctgccaggcgggttcttgcgcggttaagtcggtcatattgttcaccattgcaaatggtccgtggtgactgtcggcgcagcaagcttcgcgaaatagatttaggaataagcgaagaaaaatccctttgccgacaggcgcaaattaaatctcgtcaggtgtacgcaggttggttacggcaatgcgttcaccgcgcttgcgttcgcgctctgattgcatattggcgcgataaacgccctgatcgccaaccacccaggagagcggacgacgttctttgccgatagattcctgcaacagcatcagtgcctgcatgtacgcttcaggacgcggcgggcagcccgggatatacacatcaaccgggatgaatttatcgacgccctgcacaacggaataaatatcgtacataccaccagagttggcacaggcacccattgagataacccattttggttccagcatctggtcatacagacgctgaataaccggtgccattttggtaaagcaggttcctgcaaccaccatcaggtcagcctgacgcggcgaagcacgcaatacttntgcgccaaaacgcgccacgtcatgcaccgcggtaaacgaagtcaccatctcaacgtaacagcaggaaagaccgaagttatacggccaaattgagtttttacgaccccagttaaccatgtcattgagcttgcccataaacacgtttttgttaacttcttgctccagagggtcggttacgatctcctgcttttgcagggggtaacggtcgttctcaccgttgggatctatgcgggtgagcgtataatccatcttaatgcctcgcggttagcgttgacgattagcgatactgttcgtttccgggttcatacgctcgcggcgtgaacgcgcgggcgtccagtccagcgcgccaatacgcaccagataaaccagacctgccagtaacacaaaaataaaaattgcagcttccacaaagcctacccagccgctttcgcggatagaggttgaccatgcgaacagatacagcgcttcaacgtcgaagataacgaagaacatggccaccanataaaacttggcggacaggcgtaagcgggcggagccgaccgagtcgataccggattcaaacggcacgtttttcgacctcgcgcgtgcgcgaccgcctaaaaaccaaccgcctaccagcatcaggcaacataggccaatggcaacgataagaaagatagcgaatgcccagtgatgagcgatgacttcagtggatgttgacatactcattgcttactcatcaaaagtagcgccagattcactgctcttcacggcagatggacgccacatcgattcatggggaggaataaaaaaaaccttacaatcactgtagaaattcttttatacagctaattgatgtggtcttttactcctttctataaccttttgtcaactttaacaaaagtttcttcacattagtttacataatatcaacaccattagcatttaatgccctttcaccccagatccttgacgactccaggataattagatgttgttgaatcgtgtccgttgtgaagcaatggaaaaaatacgggtctattttgacaggaatttgtgtcgattcctccccccaaaagagagtattttcttgatctgtgacacgcttttgtcattccataacaaaaacgcagcaacaaatttacgtattttttaacatcattgtagcaggtgatttttttcaggcgattatttgtgcgtacggggcgtgaatctctggtgattgaaaaatgaacagttttgtacgttctgcacgatgtgaagaangttctttactaaaaaaaagccgctggggtttaaaacacccccagcggctcgttttttacactattgtctcaggaattatctatcgtccgtcgattactcgatatccctttcaatcaacaatgaatcatccccttccggagcagatattgggctgtattgccacggattatggtagctctccatcgcctgatagatcacctgggccagctcattattactggacgggtcatagcacagcaaatattcggtatcaggtagcggcggtaagccatctactccactcagcacacgcaagtccggactcatcatctcgaccggccttgccgtcacgccaagaccggctttcactgccgcacgaacggccggaagcgtcgaggcgacataagccagtcgccagggaatatctgctttattaagcgtcgccagcaccatatcgcgaaacggacttggatcatccagcaatacaagagggatcggctcacctttttgcaatacgtattccgctgcgcagtaccagtgtgttggcgaggtacgcaggttcaatgccttaaacgctgaaggacgatgggtggttaccatcaaatccacttcctgggattccagcatttctgccatataggcattacgtttaacgcggacatccagcgctaatttcggataaaccgaactcacgcgatttaacaggaaaggtaagatcgtatcggcagattcatctgaagcaccgatagttaacacgccctgaagattactgaacattaatgatgagcaggcctcatcattaaaacgcaggattttcctggcgtaaccaagaagttgaatgccatgttcagttaacagtttgttgcgaccgtgacgagcgaacagttctttcccaacgagttgttccagacgctgcatttgctgacttacggcggactgagtacgacacacagcggcagctgcggcagcaaaagtgttcagatcggcaacagcaacaaatgttctcagcagatcgaggtcgaggttaattatcggacgatttgcacttatcatatattatcacttactggcggctcatactgagctggttaatgctgtgcacacacaaacaagcaattccatttgtaatgtgcctccctggcagtttcatccggaacccggacgaaagtaaaaatgcatatgagttgcactaaaaaagcgactcacattgttccgttataatgcctgaagtagatcacagaatatatcttcagggatcgcatatctattaagttactcactcttttctatttatgacatgcgcgtgtttgtataaatgtaaatgtgagtccttgttccactctcgtgcagcatcgctggtcatacgcgaacacgtacaaacagcaatggtgaggcggcatcaagagcagggatccgtcatttatgcgagcattttaccccaaaaaccttttatttataagggtcattgcgaattatctgatgcaaagttatgttatgttaggcaaagtaatcttctattattaataagcacatcaaaacctttttgaatattaaataataattaattagcatcatcctcattcattaattccgcttaacaatagtttcacaccttgcccccattgcgacacctcggaaatcatcacgctgttaaactctccgtaatgcggaaatatcatcatcgcgtttcattagtgaattcttaaatgaggcattttcacacaattatcttacagataaaaaaaccagacttacaattaagaatcagaacaattcactatataacattgcatgcaaagcatatacacctcattattttgtcattattaagttattaacagcacaatcgagccttcccctctggcaaaatcttattctgcagaccttcaaaacaccgtcctgggggagtacattgttctaagctgacttccacggcagggagtggcgataacagcaaaaaaggtcaagattcatgtcccccattgaaaaatccagcaaattagagaatgtctgttatgacatccgtggtccggtgctgaaagaagcaaaacgcctggaagaagaaggtaacaaggtactgaaactgaacatcggcaacccagccccgttcggttttgacgcgccagatgaaatcctcgttgacgtgatacgcaacctgcctaccgctcaagggtattgcgattccaaaggtctttactccgcgcgtaaagccatcatgcagcactatcaggctcgtggcatgcgtgatgttaccgtggaagatatttacatcggcaatggtgtatcggagcttatcgttcaggcaatgcaggcattgctgaacagcggggacgaaatgttggttcctgcaccagattacccactatggaccgcggcggtttcgctttccagcggtaaagcggtgcattatctttgcgatgaatcctctgactggttcccggacctcgatgatattcgcgctaaaattacgcctcgtacgcgtgggatcgttattatcaacccaaataacccaaccggcgcggtatattccaaagagcttttaatggagattgtggagattgcacgtcagcataatctcattatcttcgccgatgaaatttatgacaaaattctctacgacgacgctgagcatcactcaattgcgccgctggcacctgacctgctgaccattacctttaatggactgtcgaaaacgtaccgcattgcaggcttccgtcaggggtggatggtgttgaacgggccgaaaaaacacgccaaaggctacatcgaaggtctggaaatgctggcttcaatgcgcctgtgtgctaacgttcctgcgcaacacgccattcagaccgcgctgggtggttatcagagcatcagtgaatttattacccctggcggtcgtctttatgagcagcgtaaccgcgcgtgggaattgatcaacgatattccgggcgtttcctgcgtgaaacctcgtggtgcgctgtacatgttcccgaaaatcgacgccaaacgctttaacattcacgacgatcagaaaatggtgctggatttcctgttgcaggaaaaagttctgttggtgcaagggacggcattcaactggccgtggccggatcacttccgcattgtcacgctaccgcgtgtcgatgatatcgagctgtcgttgagcaagttcgcgcgtttcctttctggttatcatcagctgtaatcttaatttcactgccggagattgcatccggcagtgttatcccgccacaatgacctgatgatgtcatcatacgtaaggtcactatgaaacagagccatttttttgcccatctctcccgcctgaaactcattaaccgctggccgctcatgcgcaacgtgcggacggaaaatgtgtccgaacacagtttgcaggtagcgatggtcgcccatgcgctggcagctatcaaaaatcggaaatttggcggtaatgtcaacgccgaacgtatcgctttactggcgatgtaccacgatgcctcagaagtgctcaccggcgatctccctactccggtgaaatacttcaattcgcaaatcgctcaggagtacaaggctattgaaaaaatcgctcagcaaaaactggtcgatatggttccggaagagctgcgggatatctttgcgccgttaattgacgagcatgcatatagcgatgaagaaaaatcgctggtgaaacaggcagatgcactgtgtgcatatctgaaatgtctggaagaactcgcggcgggaaataatgaattcttgctggcaaaaacgcgactggaagcgacgcttgaagcgcgccgcagccaggagatggactacttcatggaagtatttgttcccagcttccatctttcgctcgatgagattagccaggattcaccgctgtaagcagctggagtctgcgtcgcatcaggcaataagcgccggatgcgacatcaggctcttgtcaaaacggaaacagcatcgggatcatcaccacacaaaccgccatcacgataatggtgaacggtacccccagcttcacaaagtcactgaagctgtaatttcccggacctaaaaccaatgtgttaacaggtgaagaaaccggtgtcataaaggnggcggatgctgccatcgccacgaccatcgcgaatggataaggcgacacccccatcgttttggcagcagccagcgcaatcggagccatcaacaccgccgtcgcggtattagagataaatagcccaataaccgccgacaagacaaacaaacaacccagcatcatatgtggcccgtaaccaccgccaatgtccatcagccctttcaccgccagcgcgacacctcccgttttctgtaatgccacagcaaacggcatcatcccaacgatcaaaataatgctcggccagtgaatggatttataggcgctttcagcatctatacagcggaatttccccatcagcaggcaggcgatgatagcggcaacaggattaggaatttcatctgtcagcattaacgccaccattagcaccagacagaaaatggcatggggtgcctggctgtgcgcgggcgatgcttcactcacctcttccggtaagttcagcgctacgaagtcgcngccctgtttggccagcataccgatcagtttccagttacccacaaccaggatgatatcgcccagcagcagaggctcatccgccagcgaaccttccagcgccacgccattgcgctttagccccaccacattcagtccgtagcgggtacgaaaaccaatttcgcgcaccgatttaccaatcagttctgactcaggaattaatgaaatctctgccatgcccacatcaagggcctggtcagaaaaatactcgccgcgcagtaccatcggctccagcaattgctcactacaaaattgccggagatcgacatcagccgcagacatatcaataagcaaaacgtcacgcgcgcgaaattcagaaaccccattaacgttcacgataacgcgacgaaaacgccgccagcgttcaacaccgatgacgttagcgccataacgctcacgtaatttgagatcatccagccgttgaccaatcattggcgatccggggcgaatagccagacgtcgcgcacgcccggtcagtcgatattcacggataagatcgcgaaaggttcgacgcgtccagcnttcgcgctgcggggtctgggtatcccctttcagcatgaaacgcatcactaacatatacaaaatacccagcaccagcacgaccagaccaataggtgttacgctaaagaaactgaagccgtgatagccttcacgcagcaattcactgttgactaccaggttcggcggcgtcgccaccagcgtcatcatgccgctaatcagcccggcaaaacttaacggcatcatcagacgtgacggcgaagtttgcatacgcatggcaacgcttaacaccacgggaataaagatagcgacaacgccggttgaactcataaacgcgccaagccccgcgacggtcagcatcaacaaaaccaacattttgatttcactgttgcccgcaactttgaccagccatgttcccattacggtggcaacaccggtacggaccaaaccatcgccaataataaacaaggcggcaatcaggacaacgttaggatcagaaaagccggaaaatacttctgggactgtcagcgttccgcttaatgcaaacgcgacaataacaaacaaagcgaccgcatccatacgcactctgcccgtcgcaaacaagacgatggcaacggccagtaatgaaagaacccaaatcaattcaccgttcacaacttatccttgttaattgagggggatgacttgattctgccataaaaaagccccgacgagacggggctaaatcatgatcaggtgtttcactgaataataacatcgccatttggctgtttggtcacagtaatttgctccagactgtggaggaccaaatcgacctcattcaggcgcggggtatctgccggagcgttaaccgcaatgacatggcaacccgccgccaggccagaaagcacgccagcgggagcatcttccaccaccacacactcctgcggcgcaagccccagcagctgcgcgcctaacagatacgcatcaggttctggttttccgcgcttcactcgctcagcgcttacaaacacctctggtgcgggaagccccgctattttatggcgcgctcgcgctaccggcatggagccagaagtcacaatggcccacggaatacctgctttattcaaatgattgagtaaggcgattgcccccggaagcgcggtaataccttcggtttccgtggcctcgatttgctccagacgcgtaaactcggcggcaatatcagcctcggatttgcccgccataaaatggcgcagagaggtgatcgcctgtttaccgtgaatgaaagccagcacctcttccggcgctaacccatgacgtctggcccagttgctccacgcccgttctaccgcaggcagggaatccaccagcgttccatcaagatcaaacagaaaacctttgcaccgcacgcgggcctcctcaggcgttgataatttgattaatttcgttggcgctcaaatggtactgacgcgggcaggcatgccacacattaagcatgcgctgatatttttcccacattggcgtctgggcgttaaaaccgtgagttccggcgtcaaaatgggtatagcgcccttccacattaaccataaagcggacataaccgaggtaacgtgcttcagtggcggcgtcaaagccgaggaaggtgacacgacgttcatcgatggattgctggtcctgcaaattagaccaggaaacatgcaacgcatgatacatctccataatgtcgatgatagtgcggcaggtttcttctttcagctcgccaaactcgcgatccagttcacgcatctgtaatccataaccccgctcaatgattgtttgcaggcgacggtaacgttcagcatttgccggatcgagcatagtcatcatcttgtactggttagacaaaataagacgttgcgcgttggtcatttccattgttgactcctgtatcactctactacggtgaaaaaaaagaaggctgagtatgccttcttttatatgcgtaatcaggggtcaattacaaatcatcaaggaaagttttatccagttgtttgaaggcacgcttaagcgtgtcagctaatgcctggtaatcaggcttgccttcaacgggtgccaacacctgtccagactcctgcaatttaccgcgaacttcataaaaccagttgaggattgcagggggtaatggcgtgacagaacgnttgcccagccaccacaatccctgcatgggtaaacttaaggcgaacagggcagtggcaactgccggcccaagctgaccgcccagggcaatctgccagcagagagtaaatacggcgatcggcggcataaaacggatcgcataacgcgtcatcttgataacgcgattttcgacaaagaccggggcaaggcgtttttccagcggccacgtctttgagtaatgctgtccccggcgaaacaagctaaaaaaattaacagaacgattatccggcgttgacatgcttcacctcaacttcacatataaagattcaaaaatttgtgcaaattcacaactcagcgggacaacgttcaaaacattttgtcttccatacccactatcaggtatcctttagcagcctgaaggcctaagtagtacatattcattgagtcgtcaaattcatatacattatgccattggctgaaaattacgcaaaatggcatagactcaagatatttcttccatcatgcaaaaaaaatttgcagtgcatgatgttaatcataaatgtcggtgtcatcatgcgctacgctctatggctccctgacgtttttttagccacgtatcaattataggtacttccatgtcgagtaagttagtactggttctgaactgcggtagttcttcactgaaatttgccatcatcgatgcagtaaatggtgaagagtacctttctggtttagccgaatgtttccacctgcccgaagcacgtatcaaatggaaaatggacggcaataaacaggaagcggctttaggtgcaggcgccgctcacagcgaagcgctcaactttatcgttaatactattctggcacaaaaaccagaactgtctgcgcagctgactgctatcggtcaccgtatcgtacacggcggcgaaaagtataccagctccgtagtgatcgatgagtctgttattcagggtatcaaagatgcagcttcttttgcaccgctgcacaacccggctcacctgatcggtatcgaagaagctctgaaatctttcccacagctgaaagacaaaaacgttgctgtatttgacaccgcgttccaccagactatgccggaagagtcttacntntacgccctgccgtacaacctgtacaaagagcacggcatccgtcgttacggcgcgcacggcaccagccacttctatgtaacccaggaagcggcaaaaatgctgaacaaaccggtagaagaactgaacatcatcacctgccacctgggcaacggtggttccgtttctgctatccgcaacggtaaatgcgttgacacctctatgggcctgaccccgctggaaggtctggtcatgggtacccgttctggtgatatcgatccggcgatcatcttccacctgcacgacaccctgggcatgagcgttgacgcaatcaacaaactgctgaccaaagagtctggcctgctgggtctgaccgaagtgaccagcgactgccgctatgttgaagacaactacgcgacgaaagaagacgcgaagcgcgcaatggacgtttactgccaccgcttggcgaaatacatcggtgcctacactgcgctgatggatggtcgtctggacgctgttgtattcaccggtggtatcggtgaaaatgccgcgatggtccgtgaactgtctctgggcaaactgggcgtgctgggctttgaagttgatcatgaacgcaatctggctgcacgtttcggcaaatctggtttcatcaacaaagaaggtacccgtcctgcggtggttatcccaaccaacgaagaactggttatcgcgcaagacgcgagccgcctgactgcctgatttcacaccgccagctcagctggcggtgctgttttgtaacccgccaaatcggcggtaacgaaagaggataaaccgtgtcccgtattattatgctgatccctaccggaaccagcgtcggtctgaccagcgtcagccttggcgtgatccgtgcaatggaacgcaaaggcgttcgtctgagcgttttcaaacctatcgctcagccgcgtaccggtggcgatgcgcccgatcagactacgactatcgtgcgtgcgaactcttccaccacgacggccgctgaaccgctgaaaatgagctacgttgaaggtctgctttccagcaatcagaaagatgtgctgatggaagagatcgtcgcaaactaccacgctaacaccaaagacgctgaagtcgttctggttgaaggtctggtcccgacacgtaagcaccagtttgcccagtctctgaactacgaaatcgctaaaacgctgaatgcggaaatcgtcttcgttatgtctcagggcactgacaccccggaacagctgaaagagcgtatcgaactgacccgcaacagcttcggcggtgccaaaaacaccaacatcaccggcgttatcgttaacaaactgaacgcaccggttgatgaacagggtcgtactcgcccggatctgtccgagattttcgacgactcttccaaagctaaagtaaacaatgttgatccggcgaagctgcaagaatccagcccgctgccggttctcggcgctgtgccgtggagctttgacctgatcgcgactcgtgcgatcgatatggctcgccacctgaatgcgaccatcatcaacgaaggcgacatcaatactcgccgcgttaaatccgtcactttctgcgcacgcagcattccgcacatgctggagcacttccgtgccggttctctgctggtgacttccgcagaccgtcctgacgtgctggttgccgcttgcctggctgccatgaacggcgtagaaatcggtgccctgctgctgactggcggctacgaaatggacgcgcgcatttctaaactgtgcgaacgtgctttcgctaccggcctgccggtatttatggtgaacaccaacacctggcagacttctctgagcctgcagagcttcaacctggaagttccagttgacgatcacgagcgtatcgagaaagttcaggaatacgttgctaactacatcaacgctgactggatcgattctctgactgccacttctgagcgcagccgtcgtctgtctccgccagcgttccgttatcagctgactgaacttgcgngcaaagcgggcaaacgtatcatactgccggaaggtgacgaaccgcgtaccgttaaagcagccgctatctgtgctgaacgtggtatcgcaacttgcgtactgctgggtaatccggcagagatcaaccgtgttgcagcgtctcagggggtagaactgggtgcaggcattgaaatcgttgatccagaagtggttcgcgaaagctatgttggtcgtctggtcgagctgcgtaagaacaaaggcatgaccgaaaccgttgcccgcgaacagctggaagacaacgtggtgctcggtacgctgatgctggaacaggatgaagttgatggtctggtttccggtgctgttcacactaccgcaaacaccatccgtccgccgctgcagctgatcaaaactgcaccgggcagctccctggtatcttccgtgttcttcatgctgctgccggaacaggtttacgtttacggtgactgtgcgatcaacccggatccgaccgcagaacagctggcagaaatcgcgattcagtccgctgattccgctgcagccttcggtatcgaaccgcgcgttgctatgctctcctactctaccggtacttctggtgcaggtagcgacgtagaaaaagttcgcgaagcaactcgtctggcgcaggaaaaacgtcctgacctgatgatcgacggtccgctgcagtacgacgctgcggtaatggctgacgttgcgaaatccaaagcgccgaactctccggttgcaggtcgcgctaccgtgttcatcttcccggatctgaacaccggtaacaccacctacaaagcggtacagcgttctgccgacctgatctccatcgggccgatgctgcagggtatgcgcaagccggttaacgacctgtcccgtggcgcactggttgacgatatcgtctacaccatcgcgctgactgcgattcagtctgcacagcagcagtaacctcgtcatcatccgcagctttgcgctgcggatatctgaaccggaaatagtcactatttccggttttttattctcttaatttgcattaatcctttctgattatcttgcttaactgcgctgcatcaatgaattgcgccatctcactttgcatacttaccactttgttttgtgcaagggaatatttgcgctatgtccgcaatcactgaatccaaaccaacaagaagatgggcaatgcccgatacgttggtgattatcttttttgttgctattttaaccagccttgccacctgggtagttccggtggggatgtttgacagtcaggaagtgcagtatcaggttgatggtcaaacaaaaacacgcaaagtcgtagatccacactcatttcgccttctgactaacgaagcaggcgaacctgagtatcaccgcgtacagctgttcacgacgggcgatgaacgcccgggcctgatgaacttcccgtttgaagggttaacctcaggatcgaaatacgggacagccgttggcatcatcatgtttatgctggtgattggcggcgcgtttggcattgtgatgcgtacaggaaccattgataacggtatcctggcgcttattcgccatacccgtgggaatgaaattctctttattcctgcgctgtttattctgttttcacttggcggcgcggtatttggtatgggggaagaggccgtcgcctttgccattatcatcgcaccgctaatggtccggctgggctatgacagtattaccaccgtcctggtgacctatattgccacgcaaatcggttttgccagttcgtggatgaacccgttttgtgtggtcgttgctcaggggattgccggcgttccggtgctttctggctccgggttgcgcatcgtggtgtgggttatcgccactctgattggcctgatctttaccatggtgtacgcctcacgagtgaaaaagaatcctcttctgtcacgcgtgcatgagtccgaccgcttctttcgtgaaaagcaggcggatgttgaacaacgtcagtttacctttggtgactggctggtattgattgtcctgaccgccgtaatggtctgggtgatttggggcgtgatcgttaatgcctggtttattccagaaattgccagccagttcttcaccatgggtctggtgattggcatcatcggcgttgttttccgccttaacggtatgacggttaataccatggcttcatccttcaccgaangggcgcgaatgatgatcgcccctgccctgctggtgggtttcgccaaagggattttgctgctggtcggtaatggtgaagcgggtgatgccagcgtgttaaatactatcctcaacagcattgccaatgccattagcggtctggacaacgcggtcgcggcctggtttatgttgctcttccaggcggtatttaatttcttcgtgacgtccggttctggtcaggcggcgttaaccatgccgttactggcaccgcttggcgatctggtcggtgttaaccgtcaggttaccgtgctggctttccagtttggtgatggcttcagtcacatcatttacccgacctcagcttcgttaatggcgacgctcggtgtttgccgggtggacttccgtaactggctgaaggtgggcgcgaccctgcttggactgctgtttattatgtccagcgtcgtggtgatcggcgctcagttgatgggctaccactaaaaatgttaagagccgcaattgcggctcttttttcattctgccgtttcagtctctacggcttcatttttggcattgcgcttcatccacaacgctagcgctttcagcgagtctggagtgaactcatcgcagcgtgcggtgatttcttccggcgtcagccagcaaacttcactgacttcatcttcctgtagggcgaagggaccgtgagagacgcagctgaacaatgcgccccagacacggcaatttttatcttcgaaatagaactgcccgtgctcggcaaaggggacaccggcaatgcccaactcttcttccgcttcgcgacgcgcggattccagcagttgctcatcggcctggactacaccgcctgcggtcgcatctaacatgccgggtaaaaagtcttttgtctcggtacgacgctggaccagaattttgcccatgccatcatgcacgacgatgtaagttgcacgatgacgcagacactgtgcccgcatttgctcccggctggcttgtgcaatgacttcgttctcttcattgacaatatccacccattcagtacttgccaaacgacgctgttccattatcaggaaaccttctttttctggcgctcttacggcgcattttgagttgtgggtaaattacggattaatcgcgacctgcgcaatgatactttgatcattaagtgcgattacactaagtacgtcattatccagcatgccataactcgccggattaccgcctttcggaatactcaccgagccggggttgaagtggaaaatctccccccgctgttctgctactggcagatgggtatgaccgtaaaccagcacatcgttctggtttaaagcaggcagattttccgggncaaaaagatgaccatgcgtcaaaaacagacgttgtttttccagtaatacctgttgccacggcgcggttatcgggaaatgcagcagcatttgatccacttcgctgtcgcagttgccgcgcacagcgataaccttatgtgccacttcattaagccgttcagcgactttggctggcgcgtaaccctccggtaaagcattacgcgggccgtgattcaacacgtcgccaaggatcaccagccactgggcaccgctttgggcaaacaactccagaacacgttccgtcgccggtaacgacccatgaatgtccgatgcaaacatcagtttcatcactcactcctcgtcgaaaaaacgtaagctatgatactggattctgtcgttgctatcagccagattgcttcgctgaaagtgcaataaaacgctggacagacgctcgctgccactggaatgtcgcataatccaccaggcattctggcacctcatcgccatgtagtaccaggcggttaatcattagcgccagatcagtatcagcaatgcaccattcaccaaataaattcggctgacccagtactaacaaatgttctgccatcgcgaacagtttctctgcactggcttttccctcggccgttagtggcgcttttttcgcccccgcaaagacaacatctgtcggacgctcttcgcggatgggcatcagatcgctgcgcaaccaggcctgaatctgtcgtgcacgcgcacgattttctaaatcaagcggataaatacgttcccaggtcggtggcgcaaatcgatcttccagatactccgcaatggcagaagattcactcaactcaaaatcatcgatttgtaataacggcacacggcgtgtctgaccgtaaccttgccacgtcggttgcaaatgttcaccgctgtcgaggtcgatggtcttgatatgaaacaacaggcctttttcctgcaacgccacccaagcggataacacataaggggagaaaaaatgggcatctgaccaaagcgtgatagcgggtttactcattatgtcctcggcaataaagggggctggctatcaaactatagagcctttttgtcactgtcacgtgacgaatactcacgtaagtcgccgcgctttctataattgtggtgttcagatgattagacaaccggagctccaatgatcgatctctatttcgccccgacacccaatggccacaaaattacgctgtttctcgaagaagcagggctggattatcgcttgataaaggtagacctggggaaaggcggtcagtttcgcccggaatttttgctcatttcgcctaacaacaaaattccggcaattgttgatcattctccagccgatggcggcgaaccgctaagcctctttgaatctggtgccattttgttgtatctggctgagaaaacggggctctttttgagtcatgaaacgcgtgaacgcgccgccacattacagtggttattctggcaggtaggcggactggggccgatgcttgggcaaaatcatcattttaatcacgcagccccccaaaccattccttacgctattgaacgttatcaggttgaaactcagcgtctgtaccatgtactgaacaagcggctggaaaactcgccctggctgggaggcgagaactacagcattgcggatattgcctgctggccgtgggttaatgcctggactcgccagcgaatagacctcgctatgtatccggcagtcaagaactggcatgagcggatccgttcgcgccctgccaccgggcaggcactgctaaaagcacaactcggtgatgagcgttcggatagttaacagaaacaggttctcgtgtattatttcatcctaagtaaaacaacggagaacctgcaatggcacaacctgccgctattattcgtataaagaaccttcgtttacgtacatttatcggaattaaggaagaagaaattaacaaccgtcaggatattgttatcaatgtgacgatccactaccccgccgataaagcgcgcactagcgaagatatcaacgatgcgctgaattatcgcaccgtaacgaaaaacattattcagcatgtagagaataaccgtttctctttgctggaaaaattaactcaggatgtgctcgatatcgcacgtgaacatcactgggtgacgtatgctgaagtggagatcgataaactgcacgcgctgcgntacgccgattcggtatccatgaccttaagctggcagcgttaaccgccatatcgggaggctgcatgaacatagtgatcaccggagggacgggattaattggtcgccatttgattccacgtttgctggagctgggccatcaaatcacggtaatgacgcgtaacccgcagaaagccagttccgttctcggccctcgggtgacactatggcaagggcttgccgatcaaagcaacctcaacggcattgatgcggtaatcaacctggccggagaaccgattgctgataaacgttggactcacgagcaaaaagagcgtctctgccaaagccgctggaatatcacgcaaaaactggtcgatttgattaatgccagcgacacgccaccgtcggtactcatttccggctcggcaacgggctattatggcgacttaggtgaagtggtggttaccgaagaggaaccgccgcataacgaatttacccataaactctgcgcccgctgggaagaaattgcctgtcgggcgcaaagtgacaaaacgcgagtgtgcctgctgcgtaccggcgtagtgctggcaccggatggcggtattctcggtaaaatgctgccgccgtttcgtcttggcctgggcgggccgattggttccggtcggcagtatctggcctggattcatatcgatgatatggtcaacggcattctctggctgctggataacgagctgcgcgggccatttaatatggtttcgccctacccgatacgcaatgaacaatttgcccatgcgctcggtcatgcgctgcatcgcccggctattttgcgcgtccccgcaaccgccattcggctgttaatgggcgaatcttcagtactggtattaggtggacaacgcgcgctgcctaaacggctggaagaagcgggttttgcgtttcgctggtacgatttagaagaggcgctggcggatgtcgttcgctgatgtggtttactgcaaacatccgccagttaactcccggtgttacagggttagtggctttgcgcgataagatcgtctggtgaaagtcgggtcagcgtcaggatgacttcgtggtcaaatcctttttccagcatctcctgagcaatacgcagagcttcttcgtgtttgccctgcattgcgccttcttcacgtaatctgtcagcaatggtcatcagtttctccttttcttgtggtgcgcgttctgttatctcaccaataaatgcacggaaacgctgggcatctcccgtttgtaatacataattaaacagggcttttagctgtctgtcattagtgttccctgtaactagcagcgaaacaatttggtcgactaatcccaacagatcgcgctgacgaatatgtttctgaattaactccaacagcgccattttacgatgttgcataatctcgtcatccggcaccacggtaatatccaccaacggaaaagccgatgaatatattttacgggcaatcgcaggctcggcaaattcatcaagccagcagagtgaataaggataaggacttctgcaaccatgataaaacagcatcgggatcaccaatggaagctctttatagcccgcatcaagatggttttgcattgccgcaatggaataacgcatcatgcgaaaagccattaattcttccggcttactttggtgctctatcactacataaagataacccactccctcctgcgttttcacagaccacaagaggtcggaataatattgccgcaggtcttcatcaataaaactgtttggttccagtttaagcgtcgttaaatcacacagtttgcgcagcggcgcgggaagatgaatatcaataaaatcccgcgcggtgtctggatggcgtaaaaaagatttaaataccgcatcatgcggcgtggaagttgtcgatattgtcatggcgttccgtcacccctcaaatttaagatgacgcgacaataaccacgattaacacccaatgcagcaggcagtttttatctttggacagcgaattcagaagtatttttagcggactgcaacttttacatttcagcggaagctgactcgcaaattccccttgaaaatactccggcagcgttagccaccggagaggcaattatttcagcgaacctttaaggaactgttgcagacganggctttgcgggttgccaaataactgctccggcgcgccttcttcctctattttcccctgatggaggaaaatgacgtgagtagaaacatggcgagcaaagcccatttcgtgggtcaccaccaccatcgtttttccctcttccgccagctgctgcataatgcgcagcacttcacccaccagctctgggtcaagggccgatgtcggttcatcaaacaacagaacttccggttccattgccagcgcccgcgctatggaaacacgctgttgctgaccaccggacaggtgcaccgggtatttcccctgcgcacgttcgtctatcccgacttttgccagatacttcaccgcccgctcgcgcgcttcctgcttgctcaggcccaacacctgaatcggcgcttccatgacgttttccagcaccgtcatatggctccagagattgaagtgctggaataccatcgtcaggcgtgtgcgcagtaagcgcagttgatttttatcggcgactttgagttgaccgtctttgtcgcgcaccagattgatcgtctggccattgaccacgatcgacccttcactcggtttttcgaggaagttaatgcagcgcagaaaggtacttttccccgatcccgacgatccgatgatgcttattacatctccggcattcgcttgcagtgacacccctttcagcacttcgtgttcgccatagcgtttgtgcaaatcgataacgtttaatttattctcggacatcgtattctcagtgcgttgaagaaggtttcacatgctgcaaccagcgtttttccgctctgcgaaagaggctgatcaggacataagagatgattaaatagagcaccgcggcaatgccgaaggcggtaaaaggttgatacgtggcggcgttaatatcgcgggctattttcagcagatccggcaccgtggcagtaaatgccaacgcagtagagtgcagcatcaggatcacttcgttgctgtatgccggtaacgcaatacgcagcgcagaaggcaaaataatgcagcgatacattttnaaagtcgagaagccataggntctggcggcttcaatttccccatgcggcaccgaacggattgccccagcaaaaatntcggtagtgtaagcgcaggtgttaagcgtcagcgccagcacggtacagttcaggccactgcggaaaaaggcgttaagaaactcggtccccttaacaatctccagcgtatacatgccggaatagaacaccagcaactgaacatacagcggcgtaccgcgaaaaatataggtaaataaccagattggaaactggatgtatttattactggagacacgaccaatcgccagaaacagcgccaggantccgcctatcactaccgacaaaataagcagccacagagtgatcgccacaccagtaaagcgataaccgtcggtccacagcagcggtttccagtattcatgtaagatttcgatcacaggtcagccctcttcacacctacagagtagcggcgctcaaggaacagcagcacaccattggaaacggtggtgaaaaccaggtaaatcacgccacagacgatagcgaaatagaacggttcccaggtacttttgcctgccagctgcgtggctttgaccacatcttccaggccgagtaacgaaaccagtgcggtagatttgaggatcacctgccagttgttgccaatgcctggcagggcgtaacgcatcatcgccggaaacatgatccgccgaaacacttgcccacgagtaaaaccgaacgccgtcgccgcctctatatgtcctttcggcactgccataaaagcaccacggaacgtttcggtaaaataagcaccgtagataaaaccgagagtgataataccagcgaccatcggatcgatatcaatctgcccgacgcccatcgcctccgtcaccgtgtttagcgcaatctgcaaaccgtagaaaatcagcagcatcaacactaagtccggcacgccacgaatcagcgtggtgtacccttcgaaaatcagccccgaaagccgattttgcgagagcttaccgccagcgccaattaaaccgatgattacagcgagcactacagagctgatagccagctccagcgtgacgagcgcaccctgtaaaataacacctgaaaacccatacaacatgctgcctgtcctgtcgtgtgtggtgaattaccgcctcttgtctccctccggttacccgaagggagcgggctttctttcaccgatggcgattaaccaccataaacatcaaaatcgaagtactttttcgctaatttctcgtaagtaccgtcagcgcgcatttcggcaaaggctttgttcagtgcctcgcgcagttcgttatcttctttacgcaggcccatgccggtccctacgccaaacagtttttcatctttaacagacgggccaccgaatttgtaatctttaccgacaggttgtttgaggaaaccttcgctggcagcgacctcatcctggaacgcggcatcaatacgtccggcagtcaggtcagaataaatgttgtcctgcccctgatacgagacgatttcaatgccttttggtgcccaatgttcattaccgaacgtctcctgggtagtgccctgcaatacgcctacccgtttgcctttcagcgactcgactgtcggctgaatgtcagaatttttcgccaccaccagacgagaatcggcagcgtacagtttgtcggtgaaggctatttcttgctgacgtttttccgtaatggaaagcgatgacatgatggcgtcaatnttcttcgcttttaaggacgggattaacgcatccagcggattttcgacaaacgtacattgcgtattgatgcgtttgcataattcctttgccagatcgatatcgaagccaaccagttcgccttgtgaattttttgattcaaatggcgcataggtcgggtcggtaccgatgcggatgttttgcggaatcgcagcaaatgtcgcagttgcgctggagaaggccagaaccagagagagcgatagcaccagttttttcataatgtcctcaactgacagtctttttatagggaatatttacaggtttgttacacttatcgtgccataaaattgaccatcaaggcaaaatatcccgccccgttagacgtattatttttcattaaaaatgcttaagtatgcatttcaatgcaccacgatagtgcaacaaacctggcgtgcaccatgatgatcattccatcaggtacagcttccctgcgacgtatcagtcaccgtagacattaaagtcaaaatactttttcgccatcttgtcgtaggtgccgtcctgacgcagctcgccaagcgccttattgaaggcagccgtcagttcagcatcatctttacgtagccctacaccggtgccatcaccgaagtattttttgtcttttactgatgagccagcaaaggcgaaatctttaccagcaggttgcttgaggaatccttcgctggcagcaacttcatcctgcagtgcagcatccagacgtcctgcagccagatcggaatagaccaaatcctggttggcataggccaccacatccacacctttgctacgccaggtctcgttagcgtaagcttcctgggttgatccctgcagcacaccaacatgtttacctttcagtgagtccagcgttggctgaatcggcgaacctttggcggcaatcagacgggaatctgcggcgtacagcttgtcggagaaggcaatctcctgctgacgtttatcggtaatggaaagcgacgaaataatggcgtcgatttttttcgctttcagtgaggggatcagcgcgtcaaagtcactggcaacccaggtacatttcacctgcatccgtttgcacatctcgttaccgagatcgatatcaaagccgacaaagtcacctttggcatctttcgacgagaacggtgcataggtggtatcggttccgatacgtaccgtctccggcaatgccgcatagctggaagccgctgcggaaataccgactaacaaagacagagcgagaatcgacttcttcatacataaccctcaagtgaaaatggcttttttatgttgtgtattgtgttgtgtgtttgcaggcttgttcatgcaggtcttatgccatcttgacgacaacagtaacattcaacgttaaatatgttaataagacgttgcattattgtcctaaagttgaagatagcaggtatagcggttgaatcgcagcgtttcgattgaatggcagaaacaaaatgtcgaggatttgatcgcggttgcaaaattgccctgaaacagggcaacagcggagttatgcgccctgccagcgggcaaagagatcttcaggaagggttatcgcaaactggtcaagaacacgattaaccgtctgatttatcacatcatcaagggattgcgggcgatgataaaacgccggaacgggaggcataatcaccgcaccgatttctgctgcctgcgtcattaaacgcagatggcctaagtgcaatggtgtttcacgcacgcagagcaccagcgggcgacgctctttcagcaccacatctgccgcacgggtcagtaagccatcagtatagctatggacaatgccggacagggttttgattgaacagggtaaaatcaccatccccagtgtctggaaagaaccggaagagatgctggcggcaatatcgcgcgcatcatgcgtgacatcagctaatgcctgcacttcgcgcagggaaaaatccgtttcgagggataaggtctggcgcgccgcctggctcattaccagatgcgtttcgatatctgtgacatcgcgcagaacctgtaataagcgcacaccataaatcgcgccgctggcaccgctgatgcccacaataagtcgtttcataaatagttgccctgtcagacttgcaggcagactttgcaggatttcggcgggagttgcaagtcagggtgccagaccggcaccctgagcgaaggcatcatccttcgttatgcatttcgagattttccacttcgttctgacgttgcactgctttggcgtcgtcattacgtaaagtatcgaggaaatcgaggtagccctgatcaacatctttggtgacgtagacgccgttgaacaccgagcattcaaactgctggatatccgggttttcagcgcgaacggcttcgatcagatcgttcagatcctggaaaatcaacccgtcagcaccgatgatctggcgaatttcatctacttcgcgaccgtgagcgatcagttccgtggcgctcggcatatcaataccataaacgttcgggaagcgaatttccggtgccgcagaagcgaggtacactttcttcgctccggcttcgcgtgccatctcgataatctgctcagaagtggtgccacggacgatagagtcgtcgaccagcaggacgtttttatcgcggaactcggcgcggttggcgttcagtttacggcgcacggacttacgacgcagctgctgacccggcatgatgaaggtgcggccaacatagcggtttttaacgaagccctggcggtacggtttgcccagaatacgagcaatttccagcgcgatatcacacgaggtttccgggatcgggatcaccacgtcgatatccagatcttcccattcgcgggcaattttctcgcccagcttcgtgcccatattcacacgcgcgctgtaaacggaaattttgtcgatgaacgagtccgggcgagcaaagtatacatactcaaacaggcacggattgctgaccggattgtcagcacattgacgggtaaacaactgcccttcttcagtgatgtaaatcgcttcgccaggcgcgacgtcacgcaggaaatcaaagcccagtgtatcgagcgcaacgctttcggaagcgaccatatattctgtgcggttctcgtcaatatcacgttttcccagaaccagcggacgaataccgtttggatcgcggaaagcaaccataccgtggccgataatcatcgccacacaggcatacgcgccgcggattaagcggtttgtagcagcgatggcggcgaaaatgttgtcggcttcaagcgggtagtggcggaagttgtccagctcgctggcgaagatattaagcagaatttccgagtcggaagtggtgttgatgtggcggcgtttttcttcaaacagttttttacgcaactcgtgagcgttggtcagattgccgttgtgggcaagcgtaatgccatacggagagttaacgtaaaacggctgcgcttcagaggcgctggagctgccagccgtagggtaacgcacatgaccaatgcccatattgccctgcaaacgctgcatatggcgagcttcaaatacatcgctcaccagcccgttcgctttacgcaaacggaagcagttattggcatctatggtgatgatgccggcggcatcctgaccgcgatgctgaagcaccgttaaggcatcataaatcgactggttaaccggcataacaccggcgataccgacaataccgcacatacgtctttttcctcgttaagccacatctcagagcacttacgctctgggcaagaaacttgacgagctttgcagataatcaaaaaaccatctgatgataaaactgaactgcggaatcagttgtgatttactccagtcttcgcttttcgacaccccggtaaaggagtcgagaaagaagagaatagcagcaacaatcaacacaccgcgcaatgcaccgaaacagacgcccagcacccgatcggtgcctgacaaccccgttttctccaccagcaggcctatcacgaagttcacgatagcgccaacgatcagggtggcgataaacaggaccgcgatggcaatcccatttcgaaccagttcgtcttcaaagcccgtaaaccagactgacaggtaagtgtagtaatgactggcaacaaagaaagcacaaccccatgtcaccagcgataacgcttcacgaacaaagccgcggatcaggctaaccagagaggaaaaagcaatcaccgcgattatggcgtaatcaatccagaccatatgtgtcccacgattttacgccctgtcatcctgttcggggcgcattctaacagaaaaagaaaacgtttgcgtagggatttccttcccgcgcatcaataaaaatggcgctgaaaaaatattcaacgccatcgactttttatgcctttgcggcatcggacaatgcgtgtcggatgcggcgtaaacgtcttatccgacctacggttctacccctgcgtaggcctgataagacgcaccagcgtcgcatcaggcaacggctgtcggatgcggcgtgaacgccttatccg

SEQ ID NO: 1339 - DNA, 29 bp, Escherichia coli
  Strain O55:H7
  modified_base (2)..(3): a, c, g or t
  modified_base (8)..(9): a, c, g or t
  modified_base (26)..(26): a, c, g or t
gnntctanncctgcgtaggcctgatnaga

SEQ ID NO: 1340 - DNA, 50 bp, Escherichia coli
  Strain O55:H7
agcgtcgcatcaggcaacggctgtcggatgcggcgtaaacgtcttatccg

SEQ ID NO: 1341 - DNA, 38 bp, Escherichia coli
  Strain O55:H7
  modified_base (10)..(13): a, c, g or t
  modified_base (25)..(26): a, c, g or t
cccctgcgtnnnnctgataagacgnnccagcgtcgcat

SEQ ID NO: 1342 - DNA, 86 bp, Escherichia coli
  Strain O55:H7
  modified_base (2)..(2): a, c, g or t
gngtaggcctgataagacgcaccagcgtcgcatcaggcaacggctgtcggatgcggcgtgaatgccttatccgacctacggttcta

SEQ ID NO: 1343 - DNA, 1469 bp, Escherichia coli
  Strain O55:H7
  modified_base (7)..(8): a, c, g or t
  modified_base (11)..(12): a, c, g or t
  modified_base (355)..(355): a, c, g or t
  modified_base (1285)..(1285): a, c, g or t
gcgtagnnctnntaagacgcgccagcgtcgcatcaggcaacggctgtcggatgcggcgtaaacgccttatccgacctacggttctacccctgcgtaggcctgataagacgcgccagcgtcgcatcaggcaagaccgtattaattcggcgtatagcccattaccacgccacttaagccagaaagttgcttcaactcacccagcgaacctttcagcttatctttcgaggcatccggcccaaccagaatacgggtaattttaccctgcactggcgtggatggcgacgtataaacccgataaccggcaccgcgcagcttaccgacaatctcattcactttatcggcatttttcagcgcncccagttgcacaacataggctttacccgttggcgctgctttttcttccacgaccggcttcggttctggcttcggcgcaggtggtgcttcaaccttcggcttaggcggctccaccggtttcggcttcggtgggacgaccggtgcaggttccggttcaaactcggtgttattggctgcaatagtggccggatcgagcgacggtgctgcggcatcacctgcccgcacctcttccgctgcgccttccggcggttgcgtcggcaacgcctgggtggcggctggcatcatatcaggctcatcgcgatcgcccgcttttggcaccagcgggatagccgaaaactcatcctgataatgttttttctgcccgtccagcagccctggaagtacaatcacccccagcgccaccagcacgatcgtgcccactaaccgattctgaaacttacttgccaccgcttctcctcgcgtcaatcacttccatgacatgtgcgaccgtgtggaacgaaccacacaccagcacggtgtcttccgctttagcgtccgccattgcggcatcccatgcctgcgcaacgctatcaaatgatttgccgttacccaaatgctcaagcagttgttctgccgtggcaccgcgcggcccttccagtggcgcacaataccagtcatcaaccacacttttcaaccaggccagagttccggcaatatctttatcatgtagcataccgataaccgccagcacgcgcccgtttttcggtagcgttttcatacgcccggtgagatattccgccgcatgtggattatgcgcgacatcaaaaataacgcgtggcgactcgctcacaatctggaaacgtcccggcaaaattgcgctggcaatcccgtcgcgaatggcattttcactgacctccagcccgctggcacgcagtgccgccagcgccgttgnggcattcggttgcgggacaagcggcaacggcaggttttccagcgtgccgtgagcatcgctaaacgcccagtcatgatcggtgacggaatagttccactcaacgccccgacgttgtaacagtgcacctttttcctgcgccacatcagcaatggtagaaggcatttccggctcaccgacaattgcc

SEQ ID NO: 1344 - DNA, 1732 bp, Escherichia coli
  Strain O55:H7
gctgcgaaagatgcctgctttctcgcgaccaatactttcgcgatctggccccagccagtcggtatgatccagcgcaatactggttactaccgcgacatcggcgtcgacaatattggttgcgtccagacgaccgcccagccctacttccagaatcaccacgtcaagttgtgcctgtttgaacagccacaacgccgacagcgtaccgtactcgaaataggtcagggaaatatcaccgcgtgccgattcaatctccgcaaaagaggcggtgtgggccgattccggcaattcctgaccctgcacacgtacgcgctcggtataacgcaccagatgaggcgaactgtagacgcccactttgtaccctgccgccatcagaatcgactccagcgtacggcaggtggtgcctttgccattcgtacccgcaacggtaaacacaaatggcgctggtttcagaacgccaagacgcgccgcgacctggctcacgcgctcaaggccgagatcgatagttttactgtgcaggttttccagataagaaagccacgaagccagaggcgacgcggcttgaggagtgcgtttgataatcatggtatccgctgattcgttacggtgagaatagcaaaagggcagagccagtggccctgcccttatcagttatcaggcctcaggttcctgatccggtaccgggggtaccactacgccttcacgcggcgcttcaggattcggcgctggcagattcatcaacttcgccagaatgctcgccagtttcaggcgcatttccggacgacggacgatcatgtcgatcgcgcctttctcgatcaggaattcactgcgctggaatcctggcggcagtttttcgcgaacggtctgttcgataacacgcggaccggcaaagccgattaacgctttcggttcagcgatgttgagatcgcccagcatggcgaaacttgcagaaacaccgcccatcgtcgggtcggtcagcacggagatgtacggcaagccgcgctcctgcatttttgccagtgccgcagaggttttcgccatctgcatcagcgacatcagtgcttcctgcatacgtgcgccaccagaggcggagaagcagatcagcgggcagttatcttccagcgcctgctcaacggcacgcacgaaacgtgcacccacaacagaccccattgaaccgcccataaaggcgaactcgaatgccgcagcgacaaccggcattccatacagagtgcctttcatcaccaccagcgcatctttttcgccggtttctttctgcgcagatgccagacggtctttatacttcttggagtcacgaaacttcagcacatctttcggctcaagctcgctacccagctccacaaggcttccttcatctaacaggctatgcaggcgattacgcgctgtcatacgcatgtgatggtcacacttcggacagacctcaagattacgttccagctcagcgcggtataaaacctgaccgcagctatcacacttagtccacaccccttcaggaatgctcgccttgcgggtgggagtaatgttgcttttaattcgttcaatccagctcattagggacctttctgtctgaacctggttcgatgccagttttatctttggggacgcataatgccatttttgcccccaacagaccatgaatgttgcacattaaaacataacagcccgaaactttggataaaaaagtggtcgaaccgcggagttactttttattttgcgg

SEQ ID NO: 1345 - DNA, 7142 bp, Escherichia coli
  Strain O55:H7
  modified_base (4)..(4): a, c, g or t
  modified_base (1589)..(1589): a, c, g or t
  modified_base (2023)..(2023): a, c, g or t
  modified_base (2517)..(2517): a, c, g or t
  modified_base (3103)..(3103): a, c, g or t
  modified_base (5763)..(5763): a, c, g or t
  modified_base (5927)..(5927): a, c, g or t
  modified_base (6563)..(6563): a, c, g or t
  modified_base (7124)..(7124): a, c, g or t
gcancgcgtttgtgacggattatttcgatgacgcccggcaaaatagaaaccacaataatcccgacgatcagcagcttaaggttatcctgaaccatcgggattgtaccgaagaaatagcctgcgtaggtaaaaagcagtacccacaacagtgcgccgatcacgttataagcagcgaaatgacggtacgacatgtggcccattcccgcaacaaacggggcgaacgttctgacgatcggcacaaaacgggcgagaataatcgttttgccgccatgtttctcataaaactgatgggttttgtcgagataactgcgacggaaaattttcgaattgggattactgaataacttttcaccgaacaaccgcccgatagtgtaattgaccgcgtcacccacaatcgcggcgatcagcatcagcaccaccatcatatggacgttgagatcgttggtttccagtgatgccaacgctccggcaacaaacagcaatgaatcacccggtaaaaacggcgttaccaccagaccggtttcacagaacaaaattaagaacaaaatggcataaacccagacgccgtactccgcgaccagctctgccagatgcacgtcaatgtgcaggataaaatcgatgaggaaataaatcaggtccatatttgcctatgccttgtactcgtcatctttcaggctgtaactacgttggctacagcctgaaatgttccgagcattattctcgttagtccgccagaaatagcgggcccattggcggttttggaagatcataccggtcagggtaatccaccgcgaccagatacagcccttccgcttttgccgttgctgccgccagcgttctgtcctttgccgccagcaactctgctatccagctctccggctggttgtgggcaccgacttccatcaggctgccgacaatattcctgaccatatgatgtacaaaggcattcgctttgatatcaaccaccacataaggaccgtgacgcgtgacattaatatgcataacgttgcgccacggggttcgggactggcactgcaccgcacggaacgaggtgaaatcattctcgcccagcaagcactgcgcagcccgatgcatccgttcagcgtccagcggttcgtaaaaatgggttacccctttactcagtaccgccgggcgcagccgataattgtagatgatgtagcgataacggcgagccgtggcgctaaatcgggcatgaaaatcatcaggtacagctttaacccaacgcacggcgatgtcaccaggtaaattcgcatttacgcccaacgtccacgcagcgtctttgcgctgcgcggtagtttcgaaatgcacaacctgcccggtaccgtgtacccctgcgtcagtacgcccggcgcagaagacggtgatgggttcgttcgccacctgggagagcgccttttccagcttctcctgcacactgcggacttcattctgccgttgccagccgtaatacttactgccgtcgtactcaatgcccagcgcaattttataaactggcggttgttgctggtcggacattagtacagatactcctgcaccagtttctcggcgatttttactgccatcagcgngccgccaaagcgaacgttatcggccaccgaccagaactggacttgctccggcataccgtagtcattacgcacgcagccaacagaaagatgcggcgtacccgaagcatcacctacctgagttgggaattcgttctcttcagagagcacaatatcttccccttgaacaaacgcatcacgcgcttcttctgctgccagtggacgcagagcttcaaagttgaccatctgggcatgaccgtagaataccggtgcctggacgacgcttgccgaaatcatcagtccttcgtcctgcaggattttgcgtacttcgtcaacgatacgacgttcttcacgcacgctaccttcgctatccggcagtaacggcagcatgttgaacgcgagctgacgcccgaagaaatcttcttcgtcaatcggaatgccgttgagcaatttcgcantctgccccgctaacgcatcgaccgcttttttgccctgggcggaggctgaaatcaggctggtaacactgatacgcgacaaaccgccctgatcgattaacggtttcagtgccgccagcagctggctggtcagactgtctggtacggcgatgacattccggttgcggtaatcggtcagtacaaacgggtttacttccggcaccaccagcggtacgtcgggttcgagagcaaacaatccgctgctgtcgatcaccaggcaacctgagttggtcgcttcttcaacccaggctgcggtagcttctttgcctgcgacaaaaaatgccagctgcgcctgcgtccagtcgaattcagcagcatcctgcacggtgattgtcttaccaccaaagcgcaattgttcgcctgcgctttcgttacgtgccagtgcataaatttccccaaccgggaactgacgttcagccagcgtttcaagcagggcttcgcccacagcgccagttgcncccaggacggcaatgttccagccttcagacatggtggtttactccagaaatagcaaagctccctgccaatgttatagcagagagcatgaagaagagattaacgtgccggatgatgaacggcgttaaaacccagtttacacagcaatgatgccgcactggcgtcatcacaaattacatacagagatgaccattcacggcgctcaagatagtttttgcgcagtttatcgaactcacccggtatcccggcgactttacgcagcggtgcgtcatcgcggcgcacatcatacaccaaatgcaccagccttttcagcgtcggttgatcgagcggtccatgcagagtaatgcgaccaaactctggcgcaggcagtaatgtatccagcgcaacgtgctgttcatgcccaataaacttgctataggcttcaaacacttgcgtagtaccgcgtgctttaccttccagggtatagcctgcaatatgcggcgtgccgatatccacttttgtcagcaattccacatttagttccggttcgccttcccagacatccagcactacgcttaacttctggccttcattcaggcaggtcagcancgcggtattatcgacgactgcgccacggcaggcgttaatcagaatcgctccgggcttcaggctacggatcagtttttcatccgccagatgcagcgttttgtacggcccgtctttgaagagtggcgtatggaaagtcagaatatccgcgcgctggactaactcatccagcgagcggaaatcaccctcatccccacagtcggcgcgaggcggatcgcaaagtaaggttttaatccctaacgcttccagtcgtgcctgtaaacgccgaccaacgttaccaacgcctacgatccccacggtacgctcgtgcagtgaaaatccatcgcgttcggcaagcatcagcagggaggagaaaacatattccaccaccgcaatcgcattacagccaggtgcagcggaaaaaccaattcccgcctgcttcaaccatgcttcatcgacatggtcggtccccgcagtggcagtgccaacaaatttaatgggttttcctgccagcaaagattcattcactttcgtgaccgaacgcaccatcagcgcatccgcgtctgccagttgagcgacggggattggacgcccgggaaccgcgatcacctcacccaaacggctaaataagtcgcgggcataaggcatattttcatcaacaaggattttcacgtttgtgttacctgtatgagacgagagttaaccggacaagtgtgccataatctcgcggccaagcatacttgcgaagatttcaggtataaggatacgtaatgatacaacctatttccggccctcctcctgggcaaccaccaggtcagggagataacctgccgtctggcgcgggcaatcagcctttatccagtcagcaacgtacttcgctggaaagcttaatgacgaaagtgacctcactgacgcaacagcaaagagcagaactgtgggcgggtatcaggcacgatattggtctgtcgggagattcaccgctgctttcgcgtcacttccctgccgctgagcataatctggcgcaacgtctgctggccgcgcaaaaaagccattctgcccgccagcttttagcgcaattaggggagtatttacgtctggggaataatcgtcaggcggtcacggattatatccgtcataactttggtcagacgccgctgaatcagctctcaccggagcaattaaaaaccattctcaccctgttgcaggaagggaagatggttattccgcaaccgcagcagcgcgaggcgaccgatcgtcctctattaccggcggagcacaatgcgctcaaacagctggtgaccaaacttgcggcggcaacgggggagcccagcaaacagatctggcaatcgatgctggaactttccggggtgaaagatggcgagttaattccagcgaaactgtttaaccatctggtgacctggctgcaggcgcgtcagacgctaagccagcaaaatacgccgacgctggaatcactacaaatgacgctaaaacaacctttagatgccagtgaactggcggcgttatcggcatatatccagcaaaaatatggcctttctgcgcaatcatcgctttcttctgcccaggccgaggatattcttaatcagctttatcaacggcgggttaaagggattgatccgcgtgatatgcaaccgctgcttaatccttttccaccgatgatggacacgttgcaaaatatggcaacgcgtcccgcgctgtggatactgttagtcgcgattatcctgatgctggtctggctggttcgttaaccccgacgaaacgacagtatcgtgacaataattcccagcaccgcagagatcgccccggcaagaaataccgaagagtaaccaaacgtggtcgccagcattcccgcaagcggcccggagacgccgagggcgatatcctgaaacgcggcgtaaccgcccagtgcggtgccgcgaacttgtgaggggacgcgtttaaccacctccacgcccagcgcaggaaagataagcgaacatccggctccggttaacgccgcgcccgctaatgcgacccacgcccctggggcttgccagagcagcaacaagcccaccgtttctacaagcagagagacaatcgccactttcacgccgccaaaacggtccggcatccagccaaacatgacgcgcatcacgacaaatgcgccgccaaacgcggtaagagtaaagcccgccatcgcccatcctttgctggcaaagtagagcgaaacgaaagtcccgataaccgcaaaaccaacgccttgtagtgccagacctaaccctggtttccagataagtccgacaacgctccacagagatggacgttctcccgctagggctggtactttgcgcactgtgccgttacaggcccacgccagtaagggtaatgccattgtggtgagcgccagtgcggcaaaaccgtaatggctatgaatcaacaggccaagcggagcaccaacagcgagggcaccgtaaatcgccattccattccatgacatcactttgccagagtgttttggccctacgatgcctaacccccaggtcagagcgcctgtcagtaactggctttcaccaaacccaagaatcaaacgcccgatgaccaacagggcaaatttgaacggtgcggagacaggcaaaatcgccgccagcagcaacgcgccgccagccagaccacaagctaacatcccntgaagcgccgaacgttttgcgccatattgatcggccagtcgcccggcatagccacgcgtcagcaccgtagccagaaactgaatgccgacggcaatgccgaccatggtattgccatagcccagatcatgatgaacaaacaacgggataaccggcaacggcaaccntacggtcatgtaggtgagaaaaaccgcaaaagcgatgcggaagagcgaaaaattggcagaagatcgtgtttcggtttggcttacagcagtcatgcattactccagaatgcagcgcaaggcgaggagtatccccgtctcatctctctggtttcagggttacagtgcgttggcaggatttaacgcgtacgtcttttcagaaggaaatcgacaaagcggggagtttgcctggaactggcggcgattgtcaatgatgtgaaaaagggaaccatcaggttcccttttgcgttagtgccggaggccgcattggcgcgtaacgtcggatgcgacgctggcgcgtcttatccgacctactccggcctactgcgaattaatctttcagcttgcgcattaccagcgtggcgttggtgccgccgaagccgaagctgttagacataacagtggtcagttcgcgatcggtcgtttcggtcacgatgttcagacccgcagcctgctcgtccagctcttcaatgttgatgctcggggcgataaagccgtgttccagcatcagcagagagtagatagcttcctgtacgccagcagcgcccagagagtgaccggtcatggctttggttgcagaaatcgccgggctcttatcgncgaacacttcacggatagctgccagctctttcacgtcgccaaccggagtcgaagtgccgtgggagttcaggtaatcgattggggtatcaacgccatgcatcgccatctgcatacaacgtactgcgccttcgccagagggagcaaccatgtctgcgccatcagacgttgcgccgtagccaacgatttcagcatagatgtgagcaccacgcgccagcgcgtgttccagctcttcaaccaccaccataccgccgccgccagcgataacgaaaccgtcacggtgagcatcgtaagtacgggaggctttttccggggtgtcgttgtatttagtagacagcgcacccattgcgtcgaattcgcaagccatttcccagcacagctcttcgccgccgccagcaaacacgatgtcctgtttgcccagttggatctgctctactgcgttaccgatacagtgtgcggaagtcgcacacgcggagctgatggagtagttaacgccatgaattttaaacggcgtggcgaggcaggcagaaacgccggatgccatcgctttggtgaccacatacnggccaaccgctttcaggc

SEQ ID NO: 1346 - DNA, 11831 bp, Escherichia coli
  Strain O55:H7
  modified_base (2)..(3): a, c, g or t
  modified_base (4368)..(4368): a, c, g or t
  modified_base (5001)..(5001): a, c, g or t
  modified_base (5177)..(5177): a, c, g or t
  modified_base (5651)..(5652): a, c, g or t
  modified_base (5792)..(5792): a, c, g or t
  modified_base (7429)..(7429): a, c, g or t
  modified_base (7928)..(7928): a, c, g or t
  modified_base (11168)..(11168): a, c, g or t
cnngcattgcgtcagcgccgaacacctggaaacgcggggaaccgccgccagaacctgcaatcaggccaacacgaggattattctggtaagcttccggagagaggcccgcatctgcgattgcctgctccatagaaaggaatgcataaatggatgcgtcgctcataaagcgcacaactttgcggtcaatgaggccagtggtatccagttttacgttgccccagacgtggctacgcatgccggaatccttcagctcctgagagaaagtgatccctgaacgtccttcacgcagagatgccaggacttcctgctggttattaccgatgctggaaacaatgcccaggccagtaatcactgcacgtttcattcaatacctctgtaagtcgcacatagagtaagtttcgaatgcacaatagcgtacacttgtacgccgaacaagtccgatcagccaattaatagagaaatttgcgcagccttacacacatcgctaagatcgagctaccgcctgtaagacgagtaacttacgtgaaacactactccatacaacctgccaacctcgaatttaatgctgagggtacacctgtttcccgagattttgacgatgtctatttttccaacgataacgggctggaagagacgcgttatgtttttctgggaggtaaccaattagaggcacgctttcctgaacatccacatcctctgtttgtggtagcagagagcggcttcggcaccggattaaacttcctgacgctatggcaggcatttgatcagtttcgcgaagcgcatccgcaagcgcaattacaacgcttacatttcattagttttgagaaatttcccctcacccgtgcggatttagccttagcgcatcaacactggccggaactggctccgtgggcagaacaacttcaggcgcagtggccaatgcccttgcccggttgccatcgtttattacttgatgaaggccgcgtgacgctggatttatggtttggcgatattaatgaactgatcagccaactggacgattctctaaatcaaaaagtagatgcctggtttctggacggctttgcgccagcgaaaaacccggatatgtggacgcaaaatctgtttaacgccatggcaaggttggcgcgtccaggcggcacgctggcgacatttacgtctgccggttttgtccgccgcggtttgcaggaagccggattcacgatgcaaaaacgtaagggctttggacgcaaacgggaaatgctttgtggggtgatggaacagacattaccactcccctgctccacgccgtggtttaatcgtacgggcagcagcaaacgggaagtagcgattatcggcggtggtattgccagcgcattgttgtcgctggcgctattgcgtcgcggctggcaagtaacgctttattgcgcggatgaagcccccgcgctgggtgcttccggcaatcgccagggggcgttgtatccgttattaagcaaacacgatgaggcgctaaaccgctttttctctaatgggtttacttttgctcgtcgactttatgattcattacccgttaaatttgatcatgactggtgcggcgtcacgcagttaggctgggatgagaaaagccagcataaaatcgcacagatgttgtcaatggatttacccgaagaactggctgtagccgttgaggcaaatgcggttgaacaaattacgggcgttacgacaaattgcagcggtattacttatccgcaaggtggctggctgtgtccggcagaactgacccgtaatgtgctggaactggcgcaacagcagggtttgcagatttattatcaatatcagttacaggatttatcccgtaaggatgactgttggttgttgacgtttgcaggagatcagcaagcgacacacagtgtagtggtactggcgaacgggcatcaaatcagccgtttcagccaaacatcgtctctgccagtgtattcggttgccggtcaggtcagccatattccgacgacacccgaactggcaaaactgaaacaggtgctgtgctatgacggttatctcacgccgcaaaatccggcgaatcagcaccattgtattggtgccagttatcatcgcggcagcgaagagacggcgtacagtgaagacaatcagcagcagaatcgccagcgattgattgattgtttcccacacgcacaatgggcgaagacggttgatgtcagtaaaaaagaggcgcgctgcggtgtgcgttgtgccacccgcgatcatctgccaatggtaggtaatgttcccgattatgaggcaacactcgtggaatatgcgtcgctggcggagcagaaagataaggcggtaagcgcgccggtttttgacgatctctttatgtttgctgctttaggttcgcgcggtttgtgttctgccccgctgtgtgccgagattctggcggcgcagatgagcgacgaaccgattccgatggatgccagtacgctggcggcgttaaatccgaatcggttatgggtgcggaaattgttgaaaggtaaagcggttaaggccgggtaatctgctctcgcagtgtttgccggatgcggcgtgaacgccttatccgacctacgtgtgacgtgtaggcctgataagacgcgataagcgtcgcatcaggcatggtgctccagacgccgcaacttactgctgtgacgcctgctgaaacaggttttcccacatatcggtcaccagcgcctggtcacgcggcgacaattcaccagcaccaatggctttttccagactctggctaacggtcgtatgcaccgcctgagcggagtggtcatcaccactttccagttctgcgatggctaatgtaaggtggccacgcaaatacccactggcaaacaactcatcatcactggcatggtcaaccataccgtcgattaatgccagaatgcgtgattcaaactccgcgatcatcttctttcctcattgtaaaacgtggcgctggcttcagttgagcgcttccggccacgggaactgttccgccgtaagttccggcgtgtgataataattttgtagtgctttaatgaaacgtgccgggcgttccggaatgccatttgttagataatccatcacctgcgcatgtactcgccgttgaaacaccacgcggtccggttcgaagtcgccttccagattgtcgcaactgacgttaaacgggtatcccgccgccacgcagaacaaccagtcgagcgcctgcggcttcacttcaacatcttcaaactggctttgcgtttgggcatcgcgaccgtccgggcaataccagtagccgaaatcaacctgctcgcggcgcgctttcccggcaatacaccagtgcgaaatctcatgaattgcgctggcataaaagccgtgggcaaagacgattcggttatacggtacttccgcatcagcgggaagatagatcggttcgtcgtcgcctttaatcagacgggtattaaaatcatcggcaaagcagctattaaaaatttcaatcaactgctcatagtggtgtgtactgttcattagttcatccccaaccagtggaggatctcctgtccgtggctatcataaagtaatttggcactcatcaccgccgagacgataacgatcatcgggcggatcagtttttgtcctttgctcaacaccagtcttgaacccatgcgcgcgccaaggaactgccccaccagcatcacaaagcccgtcgcccaaatcactttgccgccgagaataaacagcagtaaaccgccgatgtttgacgttgcgttgagtaatttggcgtgagccgtggctttggcgaggttgaatccgcacagcgtaacaaaggccagcgcgtaaaacgatccggctgccggaccaaagaatccgtcataaaaaccgacgcagccaccggcaattaacgcgaagggcaaaccgtacatccggcgctggcgatcttcttcacccagctttggcatcagcaagaaatagaggccgatacaaatcaccagaatgggcaaaatctgccgtaagacatcagcctgaacgtactgtaccaacagtgcgccgctcattgagccgacaaaggtcatggcaatattaagtttctgatcgcttaaactaaccactttgcggcgaataaagtagatagtggcggaaatagagccgccgcaggcttgcagtttattggttgccagagcattagcgggagacatccccgctgccatcaatgccggaatggtgagtaacccaccgccaccggcaatcgagtcgataaatcccgccagcatggcgacaaaaaagagaactcccagcaacagcggggaaaccataaacaggctattaaacgtttccattagatcacgtgctcatccagtagcgcctggcaggaaggcggcaacggangcggtgtcttcttctcaggctttgttgttcccggttttggaggttcaaaccagctttgcagttctgccccgcaaccatcgcctggtggcggtaaaggttgatcttcacactccagactatcggcaggacaacgtaatcgtacatgcatatgcgcacgatgctggaaccagggtcgcactttgcgcaaccagtcgcgatcggtgcccgcatcaaggcaaagttgttgtttaatcgccggattaacaaaaatgcgcgtgacgtctttgtcctgggcggcgagtttgatcaagctgaaaatttctggcttccacagcgtggagacaacgtgtttaccgtcgcgggaaactaagtccagtgcttgcgggcgcaagagctgcgcggaggtccagcgtgttttcggcagttgcagaaagatatcgacatccagtccggtctggtggctggcgtgaccgccgttgaaacgcccaccagcaggcattcccatatcgccaatcaacaccgtacccatgcccagattgctcacctgactactcaggcgctggataaacatcaccaggtccgggtgaccgaaatagcgacgctgatcggtacgcatgacctgataatgttcggactgtatcggcaacgtgtcancgccgacgatacaaccattggaaaaactgcctatcgattgtgcgctacccggcacaggttgggttattttttgccacggcgtcgctgccaggctgacgctactggcaagcagggccagcagcgcaatcgcggttttgttcattttttaccagcgtggaatatcagtcttcacatcngcattttgcgcccgctgccgtaacaggtgatccattaaaacgatcgccagcatcgcttctgctatcggcaccgcgcggatcccgacacagggatcgtgacggcctttggtgatcatctcaacttcttcgccaaagcggttaatggtgcgccccggcacggtaatactggaggtcggtttcagtgccatatgagcaatgatttgctgcccgctgctaattccgccgagaatgccgcccgcatggttactctggaaaccgtctttggtgatttcgtcgcggttctggctgccacgcagcgccaccacgtcaaaaccatcaccaatttccacgcctttcaccgcgttaatgctcattagcgcatgggcgatgtcggcatccaggcgatcaaagaccggctcaccaagcccggcaggaacgccactggcaacaacggtgactttcgcgccaatagagtcgccctcttttttcagcgcnngcatcagttcatctaacgcgtcgattttgtccgggtccgggcagaagaatggattttgctcgacctgcgaccagtctttgatttccagcggaatgtcgcccatctgggtcaggcagccgcgaatttcgatgccaaatttntcagcgagatattttttggcaatcgcccctgctgcaacgcgcatggcggtttcacgggcggaagaacgtccaccgccgcgataatcgcgcagaccgtatttttgttcgtaggtgtaatcggcatggccaggacggaaaacgtccttaatcgcactataatcctgagaacgctgatcggtattttcgatcaacaaaccaatgctggtgccggtagtaacaccttcaaaaacaccggagagaattttgacctgatctggctcacgacgctgggtggtatagcgcgatgtccctgggcgacgacggtcgaggtcatgttgcaggtccgcttccgtcagcggaatgcctggcggaacaccatcgacgatgcagccgagcgccagcccgtgcgattcgccgaaggtggttacgcgaaagagttgtccaattgtgtttccagccatcacggctccgttattgttgtgtttgcgtgtttacttaatctttataaatcgcgaaatgttcacgggccgccagcagctgcgctttggtgagcataaacacaccatcgccgccgttatcaaactccagccaggtgaacggaacatcgggatattgttccataagatgtaccatgctgttgccgacttcacaaatcagtacgccatcatcagcaagataatctgccgcgtttccgagaatgcgacgcgtcagtttcaggccgtcggtgccagatgccaggcccagttccggctcgtggcggtattcatttggcaggtcggacatatcttccgcatcgacatacggcgggttagtgacaatcaggtcgtactgcactttcggcaaatcacggaacagatcggaacgaatcggtatgacgttgtggatcagaccgtgttcttcgatgttctgttcggcaaccgccagcgcgtcgggagagatatctaccgcatcgacttccgcttccgggaaggcataagcacaggcaatggcgatgcagccgctaccggtacacatatctaaaatatgctgcggttgcttgctgataagtccggcaaatttattgttgatcaattcaccaatcggcgagcgcggcaccagcacgcgttcatcgacgtaaaattcatggccgcagaaccacgctttgttggtcaggtaagctaccggaatgcgttcgttgacgcggcggatcacgcgctcaacaatacgatgtttttcgctggaggtcagacgcgcggtgcgcatatcttccggaatatccagcggcaggtagagcgacggcaataccagctgtacggcttcatcccacgggttatcggtgccgtgaccgtaccagatatttgccgcgctgaagcggctcaccgaccagcgcaacatgtcctgaatggtttgcagctcatttactgcttcatcaacgaaaattttatccacgtattcctccagggcatgatcgcaataatttcggcggctagtttgccatgaagatgacgataaatcagcattcacgcgcggtgagtgaggaaaaatacgtttaaaacgatcgattgcgctacgagtcgggtaaactgtaggaaaattagaaatagagacagataaatgaaaaagaaaacaacacttagcgaggaggaccaggctctgtttcgccagttgatggcggggantcgcaagattaagcaggacaccattgtccatcggccacagcgtaaaaaagtcagcgaagtgcccgtcaaacggttgattcaggagcaggttgacgccagtcactatttctctgacgaatttcaaccgttattaaatgctgatggcccggtgaagtatgtacgccctggtgtagaccattttgaggcgaaaaagctgcgccgcggcgattattcgccggaattgtttttggatttacacggtctgacgcagctgcaggccaagcaggaactgggcgcgttgatcgccgcctgtcgccgcgaacatgtgttttgcgcctgcgtgatgcatggtcacgggaaacatatattgaagcaacaaacaccgctgtggctggcacaacatccgcatgtcatggcgtttcaccaggcaccaaaagagtatggtggtgatgccgcattgctggtgttgattgaagtggaagagtggctaccgccggagttgccatgaatattagggggnggatgcgttttgccatttcgccctgaatgctggtatcgaatgccggatgcggcgtaaacgcctgatccggcttatcaaaatgtgcaaattcaatacgttgtgattcagttgtaggcatgataagacgcgtcagcgtcgcatcaggcatcaacgcacaactacagttcattcagtacatactggaaacggcatgtagaatcaattggctcacggctactggtattcacctgtaccacaatgtcgtgtagctttctatccgtcaatggttgacgtgagggggtgactgtcacctttgcattatcacaaccatacgaggtaaaggttaataagtcagaaacagcacgacaatatgcccctctggaatcaaaaatactgccatcgcagagtttgccgctttccatcaggtaggtcgaaagcgtagtcgtgattgtcgaaccatcggattgcaatcgcagcgctttattatggctaacataattatcactccaggatatatcaaacgaagcgacgggaattgtcgggcaaatagaatcatgaactgttgggcttgtatacgtaccaaatccaaatgcctcagatactgaataaaatgaggcaatccacggacaaccataattatcagattctacagtgacgttaaaagtcatatatgcacagacaaagacacgagtattgataccagggcaatttgaggtgtccgtacgtctataatcagtcaaaaccagtgtcggtgccgggccagatccgctccaggatattaacttgagggtgtcgccttttcttgcattggagttgtattgtccgtagcttacttctcccggcgtcactaccgtgacatagaaatataaactgccggaagcagtaacgtttttcatcgcataataaattttagtactggaaaagcttgcactcatgagtttatcaccggcatagcactttggtgtttctaaactgagagcaagtaatatcagacttgtcaaaaatatcgtccattttttcattttaaaaatactcaaaagttaccgtcattgtggcggtgaaatcacccgatgtaacatttcgtccatttacggtctgtaaccaggcattaaaattgacactgttatttccctgatttaatggaaatgaggcacctgtggtactgttaataggtacagccgcccctccggcagtttcaatgccaatcccaacacccgttgcagaagatgacgaatcaatcgacagaaatcctggtaagtcggtatcttctgttcccatcaaggtcaccttgacattaaacgccgtggtgcttttgcaatctttcaactgaaaaactaacggtacgcgatctgactgaccacgttgcattaaatcgctggcagcaattgtggggaaatgaatttctgcaagtaagttgccattgattacaggagtacaggatttaccaagcaaattaccggtaaaatgcaggttatcggcagctggggccgttccgctgaacaatatcagaccactgataagcgcccacgcacggttattcttcattggtaatccacctgtaacgtagcccatgcttcaaagtctgactcgggtaagtcgacaccgctcttttttacgggtactgccgttagtaccggaagggatgtttcattcaccactaagggcgtatgcagcttaaaatcgctcccggcttgtttgaggtgtattcctaatccattgatatccgtggctacggccgaatcgtcaaagtcactctgcgtaccactccaggtcaacgtcatttccatttgagggtcacggacagcggtatcgcaggtaatggtatacggcacgacctgttcgtaattgctaccgttaatgtcatcaatattcacgtcccgaaacgtcaactctatattttgcccattactaatagagcaattgggtggctgcactaaataaccatgaaaagagacattcgagagcgccataaagctaaagctccacaacattaagagagagatccgtttcattgataatccaccacaattgtggcactggcgctaaattccgccgccgttagcgatacaccgctctgcacgacaggaaccgcttccagagccagtgcgccagatgaaaagttaaacggtaaccatgcgccaggcgttaaatccaaaatggagtgatcgcttactttctgaatacggataccaaaaccggcaatacccgtatcgattaccgtttctccgttaattacggttgtggttgcctgcatatttaagcgcaggtcgtccattgccagattgttgcacacaagcgagtagtcaatggggcgtttgtaacttaccccatcgatcttggaaatgaagacattaccgaactccacgctcgcacccgttaccgtacagggcggcggggcatcaacgagcacacgcaagaccatcgcaaccgatttactccccgccattacaggcgtgctcacaatgctacacagcaataaccacgcccaggccgaataagctcctttcatgctattgctcctatccctggcctttgctgttttgctcttcgtccacctgacaggtatttcccgtacagcggaagaacagcggcaaacgcgcaccataatcattcacataggtcagcaccgggacgctatccattttgacttttaacggcacagaggtttttggcgatatcaccatgggggaaaatcccgctgccggattgccatttttctgcgcactggcgttactgataaccacgaagtacggcgtcgggttattgacggtaaactcctgaccgctgcgggttaaggtcaccttatgctgccacgggtttttcatgctgacgttttccagcgcctttggtcgccagaacaacttaatgcgcgtctgcagcgctatctgtagcgtgttaggtttgttcgatttcggcgggatctcacgcacgttgaaatagaacacgctctcgcggtcggcaggcagcttgttgatatccggcatgccctgtaccttcacctgaccgttcatcatggaatcgatgcgctgcactggcggcaggaccgtcagtggcgagctaatcctgttaccctgtccatcttccatccagctttgtgccagatacggcattttcgggtcgttattgcgcagcgtgacgctgattgatttatcactttcgttaaaaatcaggcgtgtacggtccggcgtgacagaggcctgtactgacaggctggcggcagttatcagtaacgccagcgtcgttgcggccgttctggcagancaaaatagattcgtcatggatcattccttaatcacgttattaattggctgataccgatactggcgcttccgttggcatcacctgctgggtctgctcctggatcaccggcttaatttcatgaggcatcgaaggagatatcgcccctgtttgctggcatggtaataacaggccattgaacagatcggctggcagcgggtcaggcagatgaatatcgcagtgggccacaccgccccatgaaacgatcatatgctcgccaggttttacgcccgcgaggtagacgttgccgtcatcgtcaaccagaccgacgttctgcgcgctgtcgtttttcacttccgcgccaaacggcggataactgccatcttgcagacgcagcaccgccatcgctttttgcccgctgatcaccgagaacttacggtagccaatggccccttcggtaagcgtggcctgcaccacggactgggtggcttcggcgttttccggcaagttgtttaggtcgatatacgcctggttgcggtagtagttgttgacgtctgccaccactgccttaccgaacatattggtgtaaaccgccgcgccatttccttccaccggaacaccagccacaccgtcggcatcaatcagcagacgcgtaccgcccatattctgggtacggtggagcgcgcc

SEQ ID NO: 1347 - DNA, 20695 bp, Escherichia coli
  Strain O55:H7
  modified_base (10)..(10): a, c, g or t
  modified_base (267)..(267): a, c, g or t
  modified_base (1399)..(1399): a, c, g or t
  modified_base (1998)..(1998): a, c, g or t
  modified_base (6209)..(6209): a, c, g or t
  modified_base (6644)..(6644): a, c, g or t
  modified_base (9952)..(9954): a, c, g or t
  modified_base (12431)..(12431): a, c, g or t
  modified_base (13675)..(13676): a, c, g or t
  modified_base (15329)..(15331): a, c, g or t
  modified_base (17381)..(17381): a, c, g or t
gtgcggtgancgtcgcgccgccctgtaaggaaatacccgccgaggtgtactgcccttcatggtagttagcgctgagatcgacctgcgccagcgatccgtcgtggctgtaataaccgtcaacgctggagtgattgtcgctggtgcctacgttcaactggtaatgggttgcgtcatcgacacggctgaaataccccacctggctgctgtccgaaccgctgccgtagttgccgttatagctgatggtgctgctgtcaccccacggcatantgagcgatatgtacacacctttatcggcctggttgtcatactcgtagcggtatccggtcatggaaatgctcatgttgcggatactgcccaggttgaagtagtgcgagagcatgacgttgtagttggtctgttcgtcgcgatcccagtaggtatggccggtgtagttgagataaacagacacaccggcatccctgaagttctggttataggtggcggtgtacatctctttgtcgttgccggtgcgcaccatttcgctgtcgctggcatcgagatactcgctcatggtcatgaagttctcttccgagaagcggtatccggcaaaagtgacgcggctgttcagttcatcgaagtctttggaatagctcaggcgaaacgagttgccgtccagtgaacctttcccgtaggcggtctctttatccagacgggtatgcgagtgggtgatatcaaaggccaccgcaccaaacacagacaggtcgcgaccgacgccaagcgccgccgactgatagtgttcatctgccagcgccccgccgtatagcgaccagccgttggcaatcccccaggaagcttcgccgccggagaagaaaccgccttccacgtggtgcccccactcctgcgggcggcccatcatcagtttatagcgcacctggccggggcgagtcaggaacggcatcgaggcggtgttgatgtcatattcctgcacctgaccgttctgttcttcaatgcggatatgcagcgtaccggagaccgaatcgccaagatcctggatgcggaacggccccgccgggacctgggtttcgtagatgacgcggcccaactggctgacggtcactttcgcggtggtgtgcgccacaccggagatatccggcgcatagccgcgcagattcggcggcaacatttgatcgtcggtgctgatactgccacccacgtagttaaagccgtcgaaaatatcagaattcaggtagtcttcgccaaggccaagtttggcttttagcgacggtaaggctcgccaggcgtagtagcggctccactcccagtttttttgcgtgtcatcaccgttgataacatcgtcatcattgcttttactatgcaaataatcagtctgccagtcggcacgaagacgccatgcgccgangttcaccccaaccgtcccgttaccgctaatttcattgctgtcatccccgccattttcttcatgtcgtgtctgggcggtaatactgtagtcagcaattaaaccagatataccgtcatcccagcgtgaaggcggatcccagttgatgtcggtatattcaaggtaagcctggggtaatgaaatgactaacgctgactgactcaggtcagctttaatatcaatgccttccagttgaccgggtttcaggcatttgccgtcgtggatccattgcaggttttttgccacatcctcttttaagccaaactgcgcgaccagttcaggcgtcaggcaggcataggttttactggcatcgttctcagaggcgtaccagtaaatatcgtattcttccgtcagcggctgtttatttagttgaacctgtaaattgtatttcccaggttcgacataaccctggctggaaaatcgcttcagatcgatttttgtgtcgccttttaactccagaaaacgggaatcaaactgaatttcattttcagcccaggcattgacataactcccggacattgccaatgcaacgcagcagggaagtacccgcagtcggaaaaganaatggtcaggcatacacgtatccatccgtaattattataatttgcgcgaattccatttaaaaaccccatagcccgaaagctatgggggtatcacttagagataagtaatctggaaggtcgtgttggcttcaaaattacctaaatctggcgcatcagcagcgcccaccagccaggctttaaagtccagcgtctgcttcgctttgcctttgttggtcgccgtatcgtttacgattttctgttcgatacccgcgccgcttttataagaggttccctgagcgtcaccaatggccaggctgacattgttaaatgccgcaccagtatcggtattgtaaatggtgtagtaattgccgctgttggtagaagacgcgttaccggtgaaggtagtggtcatcgttgtctgggtgtcaaacacacagtcttgcagatggatctggaaagctttcggtgtagaagtcccgttatttttcaggatccctgaaccaatgtcacccatatcaacttccagtttgtgatcatcaggaacgatggagcacggggaatcttcaatggtgccgtagaaacgtgctgtaccattgttgccagcggcgattgttgaagtagaagcgaacgcacccattaccattgttgcagcaatagctgtttttacaaacttactcattatttgtccttaaaccataaataattaaaaatataaacattgcaatacattgattcagtcaatagcaattatttatacccagccattgaataagctatccgatctaactaacaagaaaataggtcgcataagaagatattctttggtgtgggcggatggtgatattttgtctttattgtttcaaattatatttacttaacagcgaattaaggaccgcttaatgtatagccagaatagaaatattttgaggattttcttataaaaaagaaatgaaatgcttaaaaaaatatcttacacataatttcaatttatgaataacctgcgcaaaaaagacaatcttagattaagtttgagattgtacttttttgaagttatactattaacacatcacaaataatattaaattaagacacaaaaatatcatttcttttttattattaactgttctattagtttgatgctttgtaaaaatacattacaacttagtctcatttcgtcagaaattaatagggaagcagaggaaaaagtgcgatgaattctgtatcgaagcgtatcaactccgttaagggttttgagtgaatttctactattgcaaaaagacaaatgcccgatgtacagcttacatcgggcattttttcaaacgaatcagatagctttcgccatcttcaaattacatgggctcatctgccagttgaactcgccttttccgctttcatcaagcgttacgctggcaatggccgaggtggtaaacataggcggcgtttcgcccggacataactcggcgaccagatacccaactaacggtaagtgggagataaccaacaccgaagcaacaccttcattggtcaacgcctgcaaataggcactgaccagaccaacatcgccgcagggcgttaactccggcagaacttctgcactggaaggcaggttcagacaatccccaacttcctccagtgtttgctcggctcgcaggaacgggctcaccagaacgcgttcgatttccactttttgacctttcagccagttcgccatcaggcgagattcgtcacaaccgttagtggtcagaggacgaaccgaatcactggcggcatcgagggctgcgtcgccgtgacgcatgataaaaacttgcatattgcaccgcttttgttaaccagattcgcccgttttctttcatctgaaaccagagaaagaaaacggtggccggcattgtgccttatccattcaccgaatgaaacgctgttttttacctcaatggcgtaagtatagtcaatatgcgtttacattttgaccaacaatccgccattcagcgcggattcatatagctttgaccttcttattgcaggtcagttgcagttgttttccaaaaactttccccacgcgcacccatctcgactaaacgctcgcaaggggtaaaacgtgaaccatactgcgtggccagtcgttgcattattgcaaccacttcgcccgcgccgagagaatcgatatagcgaaacggtccaccgagaaatggcggaaaaccaatgccaaataccgcaccaatatccccgtcacgcacgctacggataacctgctcatcaacacaacgtactgcttcattcagcatcaacatcacacaccgttcagcaacctgcggtgcggagagtcgcccctgcccttgtgcgccaatgagcgggtaaatggcaggatcgacctgttttttgcttttacgccctttctgaccataaagatagaaacctcgaccattttttctgcctttgcgatcgtcgttcaaaattgaagaaacaacatttgcaggcgcgctaaaacgttctccataagcggcttccagtacaggaataattttagtcccggtgtcgattcctacctcatccaaaagttggattggacctaccggaaaaccaaatttcactagcgcggcatcaatgtgcgctacccgttcaccttcggtcagcatgcggatagcttcattaatgtaaggcgctaagatgcgattgacgtaaaacccggctttgtcacgcacgacaatgggcgttttgccctgttttttcgccagttttaccgtagtggcgatggtttgcgctgatgtacccgcatgaggaataatctccaccagcggtattttttccaccggactgaagaaatgcaggccgataacttgctcaggtcgcgtggcgtgagcggcgatatcaccaatcggtaaagatgacgtattcgaagcaaagatggtatgagcggcgcaattttgctcaacttccgccaccatctgttgtttcaattcgagattttcaaacaccgcttcaataatcagatcgcgatgggcaaagccgcgatagtccgtcgttccggagattaatgccagctgtttgtcacgttcgctggctttgagatgacgacggcgaactttgccctccagctgatcccaactgtacttcagcgcatgatttatgccctgcgggttgatatctttaattctgaccggaatccccgctttacaagcagtgacataagcaataccgccgcccatcaagccaccacctaaaatccccacgctgtttaatggcgcaggcggcgcatcactgccgggatctttcttcacttccgtactggcaaaaaagatactacgcaaagcttgcgattgtggcgtcatcgccagttcgccaaacgcccgtgcttcagcgtcatagccactgctggtgccctgcgctaatcccgtttcaacaacctccaggatgcgttctgtcgccggataattgccttgagttttgtgttctgttttcttgccgaccattttgaacagcagcgcacgacctaacggccccgccagaatacgctcgcgtacaggtagagggcgggaagatgggcgatccttctttgccagctcaacagcggcttccagcagaatggagtgcggaacaacatcatccaccagccccagctttaatgcctgtttcgcccgaagttgttttccggtgaggatcatctctaatgctgtgctgacgcctatcagacgcggtaaacgctgggtgccgcctgaaccgggtaacaatccaagttgtacttcaggcaaaccgagcaccgttttaggatcgtcagtacaaacgcgaccgtggcacgccagcgccaactccagcccaccacccaggcaagcgccatgaatagccgcgataaccggaatgggcaaagcatgaatctccgccatcaactgttggccctgccgcgccagagcttccgcttcttgcgccgttttgcaattgccgatcatgttgatgtctgcgccagcaatgaagttgtccggtttagcggagacaaacaccacgcctcgcaactctttgttttcacggagttgcttaataatggcgcgcacctgcgaggcaaactccgccttcagggtattcattttctcacccggtacgtcgatggtgatgatagcaatgttgtccagacgaacattaagagtaaacgctgatgtcatttccattattccgcctccagaaccattgccgcgccaagcccaccggcagcacaggcggtaactaaaccaaatccaccgccncgacggcgaagttcatgcaatgtctgggtaatcatccgcgcgccggtcgccgcgaagggatgcccgtaagcaatcgaaccgccaagcacgttaaatttgctatcgtccacttcgccagtggcatgtgcacgccccagtgcttcacgagcaaaacgttcactacccagtagctgaatattggccaacgtctgggcggcaaaggcttcgtgcatatcaatcaatgtcagatctgccattgtcaaaccggcacgctccagcgccagcggtgttgaccaggctggaccgagcaacatgtcctgccagacatcgatagcggtaaatgcgtagctgcgcagatatcccagcggtaccagccctaattctttcgcccgggattcagtcatcaggatcaccgccgctgcgccatcggtcagcggcgtactgttcgccgccgtnaccgttccgtgtttacgatcaaacgccggacgcagctttgcgaaatcagcaagcgaggaattaccgcgaatattgttgtcttccgcgagcagttgtttataaggagggataaaggcagtcatcacctcttctttgagttttccgtctgaccatgcctgagcggcacgctgatgcgaacggtgcgctaatgcatcttgctgttctcgggtgatgccgtaggttttcgccatttgctctgcagtgtcgcccatccgcaagccggtagaatattctgctaccgcaggtggtacgggcattaagtcgcgcaaacgcaggcgagagaagagtttcagacgctggctcattgtgcgggctttgttgacatcaaccagcacgcgcgccagttttttactgacgccaattggcaataccgaagaggaatctgccccaccggcaatccccgctcggatagtccccgccatcaggctttctacgacgtttgcaaccgcctggaaactggtagcgcaagcgcggctgacgctgtaagcatcggtatgcacattcattccagtaccgagaacaatttcacgcgcaacgttgggagcttcaggcatttgtacgacctgaccaaagaccagttgttcaatcacttcggcggggatctcgctgcgtgccagcagttcgcctaccaccatcttccctaaatcaaccgcgggaatgccatgaaaagccgtcgcctggcgggcaaaaggcgtacgtaaaccgctaacaatggcgatacgatcgccctggcgggtaaccagcggtaaaacctgacccataacactcccctgtaaaaaaataaataaagtggtctgacctgatcatagtcttaaccatttttttacatttagccaagcggagaaaagggaaattgggagctatgacacagtgaagacaggagaaagaaaagaaaacgcccctacctgttgctggcaggagcgtacttatccgagaggaattaacgcagacccagctggaagatcagcatttcagcttcgcaggcaaaagtgaaatcgatatccaggcgcacaccatcagactcttcagtgaaagtcggggagattttgcacggttcggattccacgctacgggctttctcagtcagcgccgccagcgtttgttctgcttctgcgcggtttgcaaacacgcggctgtaagacgctgtgcagtcggagttgtccataatggtgccaacatccatacagcagcaaaccggggtttcatcagcactacatttactcatcgttgatttcctctgtatgtgcacccaaggtgccagataaacgttgtggatattttacgcttccggaaagtgctgctccagttgttaattctgcaaaatcggataagtgaccgaaatcacacttaaaaatgatctaaaacaaaattcacccgaatccatgagtgcgccacctccaaattttgccagctggatcgcgtttcttagatcatatttgaaaaaagatagaaacatacttgcaacattccagctggtccgacctatactctcgccactggtctgatttctaagatgtacctcagaccctacacttcgcgctcctgttacagcacgtaacatagtttgtataaaaataaatcattgaggttatggtcatgagccagaaaaccctgtttacaaagtctgctctcgcagtcgcagtggcacttatctccacccaggcctggtcggcaggctttcagttaaacgaattttcttcctctggcctgggccgggcttattcaggggaaggcgcaattgccgatgatgcaggtaacgtcagccgtaaccccgcattgattaccatgtttgaccgcccgacattttctgcgggtgcggtttatattgacccggatgtaaatatcagcggaacgtctccatctggtcgtagcctgaaagccgataacatcgcgcctacggcatgggttccgaacatgcactttgttgcaccgattaacgaccaatttggttggggcgcttctattacctctaactatggcctggcaacagagtttaacgatacttatgcaggcggctctgtcgggggtacaaccgaccttgaaaccatgaacctgaatttaagcggtgcgtatcgcttaaataatgcatggagctttggtcttggtttcaacgccgtctacgctcgcgcgaaaattgaacgtttcgcaggcgatctggggcagctggttgctggtcagattatgcaatctcctgccgggaagactcctcaagggcaagcattggcagctaccgccaacggtatcgacagtaataccaaaatcgctcatctgaacggcaaccagtggggctttggatggaacgccggtatcctgtatgaactggataaaaataaccgctatgcactgacctaccgttctgaagtgaaaattgacttcaaaggtaactacagcagcgatcttaatcgtgtgtttaataactacggtttgccaattcctaccgccacaggtggcgcaacgcaatcgggttatctgacgctgaacctgcctgaaatgtgggaagtgtcgggttataaccgtgttgatccgcagtgggcgattcactatagcctggcttacaccagctggagtcagttccagcagctgaaagcgacctcaaccagtggcgacacgctgttccagaaacatgaaggctttaaagatgcttaccgcatcgcgttgggtaccacttattactacgatgataactggaccttccgtaccggtatcgcctttgatgacagcccagttccggcacagaatcgttctatctccattccggaccaggaccgtttctggctgagtgcaggtacgacttacgcgtttaataaagatgcttcagtcgacgttggtgtttcttatatgcacggtcagagcgtgaaaattaacgaaggcccataccagttcgagtctgaaggtaaagcctggctgttcggtactaactttaactacgcgttctgataacgcgttcgcctggataaagtcacctgctatgcaggtgactttaactcccccacttcaccgaaagtagtttcctcattgcttgcctcctgagttttgcaaacagcctgatggcagctagccctttcaaatcagtaagtggtatccacagacaaacctgaagggaaacgcatattttcaggcgttctgctcgtccttctcaaagagtttacttttctgaatttccaggatactcaaccccctggctattgtgcgctcatacacgcaaattaaagataggttctaaataaatgagcgttttttgatagtctatttcattaggtaatatatannngtaacaaatcaatcaacatggaataaaatcatgctatcatctatttcaatcaacaataccagcgcagcttacccagaatccatcaatgaaaataacaatgatgaagttaatggattagtacaagagttcaaaagcctttttaatggtaaggaaggaataagcacctgtattaaacatctacttgagcttataaaaaacgccatacgaggaaacgacgatcctgatagaataaatatcaataattcttcagttacttatattaatattggttccaatgatacagaccatattactattggtatcgacaaccaagaaccaataaaattacctgcgagttataaagacaaagaactcgtccgtactatcattaatgacaacatagttgagaagactcatgatgatataaataatgctgaatttactgatggtggtattgatgatcgtagtgatattggcattgactccaatgatacagacgatattgatattgataatcaagaaccaataaaatcacccgcgaacgatgaaaacaaaaaagtcggccaaaccatcatcaatgaaaacatagtagagaatactcatgatatcaataacaagaaaatgatcttcagcgcaataaaagaaatatatgatgaagatccaagttttatcttcgataaaatatcacacaaactcagacatacggtaacggaattcgatgagagcgggaaaagcgaaccaacgggcttatttacctggtacggtaaagataaaaaaggcgactctctcgctattgtaattaaaaataaaaatggaaatgattacttatctctcggttactacgatcaggatggctaccacattcaaaaaggatttcgtattgatggtgataatctcacccaatattgtagtaaaaaagccaggagtgcttctgcgtggtttgaacacagtaaagcaatcattgcagaatcatttgcaacaggttccgatcatcaagttgtaaacgaactcaaaggggaaagactgagagaacttaacgaagcttttaatccttcaaatctagcaagaggatatgaatattaagaggatgatctcaaatatacatttgagaatacaaaagaaatagtttctactttagtcggtaacaaagttaacgttggccattctcaaaaaatatataaacattttaaggatctcgaaggtaaaactgaagaaaggcttcaaaatcgccaggctgaatatcaaaatgaaattaatcaactatatgcgctaggtgttaattttgatgatatttaaaattatttttccatttttttgatttttcaacagctgaatatcggaaatagtcagtgacgaacatcagtatttttacataattacgtccgggtcattgtcggtttatctccttttacttgtggtaattgagggataacaacaaaaaaggtgagttttgcgactcaccttttttatttgtttcttattcagaatcgatatcttttaaatcatcctgaatcgcttgcgcgttcggattttcctgcggtttgagttcgccgccattagcgatgaaatcatgacgctggaagtacgcttcgcgcaccataatataaggatcggacgactgacgcagcagaccgtcggaatccagcagctgtgcgcgggtttcgataccttcaagcgtccatttacccacagacatcggccaggtcagccaggaaagaaccgggtaaagaccatccgccatatcaccaccgtcatcacgcagcgtgaagctaccgtagaacggtaattgaacgtacgggccataacccacgccataatgaccaagcgtactaccgaagcggtgaggttcagtccgttgcagtttcgggttcgccatccctgcaacatcaataaagccgcccatccccaaaatggtgttcaggaaaaagcgggtaaagtggaccatcccctgataagggtcgccctgcaagaagtagttaaccatcaccgcaggttcttcaaggttgccggtaaaattgctcaaaccgttacgcgccggttgcggaacataatcacgccaggcgacagcgaccggtcgaacaatatacgggtctaatacattgaagttaaagttgtacatggtgcggttgaacccttctaacgggtcagaacgcccttgctgatctgtaccggaactcgcacaccccaccagaagcgtagttcccagagcaagcgccgacaggcgaagcttcataaatgtctccctgtttttttatggcttatgcagtttgccatccatgacggaacgataccgtatccgcctgtttaggtgtgggcgattgtaacagcacgtcaactgatgtccagacgccctgatttgctgatttgatcatagcctggtaatcgccgccctgtaggctacttgattctatagaaacagaaaaaggcaaacgcggccttttctacattttcaaagtaactcccgccagttgcgagcaaaaaagccgctacgctttagntatacgtgctaattcaagagaagagaccatggacaacgacaaaattgatcaacacagcgacgaaattgaagttgagagcgaagaaaaagagcgtggcaaaaaaatagaaatagatgaagatcgactcccctcccgggcgatggcaattcatgagcatatccgccaggatggtgaaaaagagctggaacgcgacgcaatggcactactgtggtcagccattgcggcgggtctgtcgatgggcgcttcattactggcaaaagggatatttcatgtcgaactggaaggtgtgccgggcagcttcttgctggagaatctcggttatacctttggttttattatcgtcattatggcccgccagcaattatttaccgaaaacaccgtgactgcggtactacccgtcatgcaaaaaccgacaatgagcaacgttggcttacttatgcggttatggggcgtcgtgctgctgggtaatattctcgggacaggtattgcggcgtgggcatttgaatatatgccaatcttcaatgaagaaactcgcgatgcatttgtcaaaatcggcatggatgtgatgaagaacacccccagcgagatgtttgccaacgcgatcatttccggctggctgatcgccactatggtatggatgtttcctgcagcgggtgcggcaaagattgtggtgattatattgatgacctggcttattgccctgggtgacaccactcacatcgttgtcggttctgttgaaatcctctatctggtgtttaacggtacgctgcactggagcgatttcatctggcccttcgcactacctactttagcggggaacatctgcggcggcacctttatcttcgcgttaatgagtcatgcacagatccgtaacgacatgagcaacaagcgcaaagcagaagcacgccaaaaagcagaacgtgcggaaaacattaagaaaaatgataaaaacccggcataaatggcgagggtttaagcaatcgagcggcagcgtacttaccccgcagtccattagcgggtatactcatgccgcattgtcctcttagttaaatggatataacgagcccctcctaagggctaattgcaggttcgattcctgcaggggacaccatttatcagttcgcctccatccgtaccagtccgcaaaatcccctgaatatcaagccttccgtagattcacagttcgtcatggttcgcgtcagatcgttgacagccgcactccatgacgggtaaaaagtggatannataattttacccaccggatttttacccatgctcaccgttaagcagattgaagcagcaaagccgaaagaaaaaccataccgcctactcgatggtaatggcctgtacctttatgtccctgtatcagggaaaaaggtatggcagcttcgctacaagattgacggtaaggagaaaatcctgaccgtcggaaaatatccgcttatgactttgcaagaggcaagggataaagcatggactgcgaggaaagacatctcggttggcatcgatccggtaaaggcgaaaaaggcttcgtctaacaacaattcctttagtgcgatttacaaggaatggtacgagcataagaggcaagtctggtcagccgcctatgcgactgaacttgcaaaaatgtttgatgacgacattttacctatcatcggcggccttgaaattcaggatattgagccgatgcaactgctggaagtaatccgcagatttgaagatcgcggggcaatggagcgagccaacaaagcacgcagaagatgcggcgaggttttccgttacgctattgtcaccggaagggctaaatataacccggcacctgaccttgctgaagccatgaagggataccgcaagaagaacttcccgtttttacctgccgaccagatcccggcattcaacaaagcacttgcaacattttcaggaagtatcgtatctctcattgcgaccaaagttttacgctacacagcactaagaacgaaagagcttcgttccatgcaatggaagaacgtcgattttgaaaacaggattatcaccatcgaggccagtgtgatgaagggacgcaagattcatgtggttccgatgtcggaccaggttgttgaacttctcactacgctaagctccatcactaaaccagtatcagagtttgtttttgccgggcgcaacgataagaagaagtcaatctgtgagaacgctgtactgcttgtgatcaaacaaatcggctatgaaggtctggaaagcggtcacggattcaggcatgaattcagcacgattatgaacgagcacgaatggcctgctgacgctattgaagtgcaactagcacatgccaacggcggatctgtgcgtgggatttacaaccatgctcagtatctcgataagtgcagagaaatgatgcagtggtgggcggactggcttgatgggaaggtggagtagttattacaacgattcttataaaaaagaaaagccttgcacatatagcaaagcttttcacttctcaggatttcttacaccaagaaaccatcaacaataacaaaatgcaattattatatgttaactacatatgcatttcattaaaaccaatcataaatgcttatcatactttaattgctataattgattgccttctattttttcaactcgagtggttgaaacatcattcttaaatccactccaccattttcttagcttattgtttattggcttttcaaaaaacaaatacatcattattgatataaataatgaagcaaacagagccattactataaatttaattacacttatagcaccaagaccagaaacattaaagaacttgctcaatgtactgattactatagtatggaccaagtaaaatgaaaaagaagcatcacctaaaagtatcataactttatttgatattatttnnnaaataataccaccattaaacgaaaacactaatattgaaaaggccattgatggtataaaaagcgcatcatactgtaatccattgctattttgactttttgccaccatatagacagacattaggataaagactacagatgatatttcagcaaatgatagaactaaatatgacggctttgacttaaactcaaaatctccggcctgattgctgcggattgtctctgccagcctgcctcggtcaatctcacgaccagccatcttgtcctgaacattgaagtagtcaatcggaccgagagcagccatcccaaggtgataaacaaactcaccaaaccctgaaggattctgctgatacatctgagcaacgttgttagggtcaacaccgacgcgcgccagttccttggcgttgttttgcagccatgattgcattgcttctggagacgaggccgcaaggcgtgcgccagccgctaaggtgccgatagaattgcgctggtcttcgtctgcccacttcataccagactgaatcttctctaattgaccaggatatttggtcatcagatctcgaacctgctgtcgatcgccggactggatggctgccgcatattctttttggaatgcagcatccgcttcctgttgctttgcggcttgagatgtttgagcgacactaccaagtccctgcaacgcctgaaggccgatgttattgcgacctgaacgctccatttcgttgttctggcgaatataggccaacgcctcacttacatcacttgcctttggcgcatttgagttttgcccaccgataccagcaagaaaaccgcctgagttgattccttgttgccaagtagccatattcccaccttaaaacaatgatccaagaccaccgataacaccgccagcaagagcaccaataccagtcccaataacaggaactgcactaccaatcattgcacctgatgcggccccaccaatggcacctgtagcaaaactctgtaggcctgaaggcttattcgcatttgctgccgatgctgccgcctgctgttgatacaattggctgacattgttagcgtagttctgtccggcgtttgcctgacctgtaagagcaccaaggccgatatttgccagattgttgtagttgttcatctgacctgacagccagttttgaccgagtgtaggtgcgattgctgctaactggtttcctgttgctgtagagcctaatccacccgttgcctctgctgctgccagactctgatagcgcgcctgccctgcaaggtctttatactgctgagagttgtaatactggttaagcgcctgaccttgcccctgaagagaggaaagattctgcaactgtgatacgtactgctgagcgagtggcgtgaacggtgcaaggttttgcatgttcgtctgccacatttcacgctgcagttcgatgcccttttcagttgcgcgtgcctgggctttagatccggagtcgctgccgcctttcatatacccattcatgggaagcaatttattcttgaagctttcgctaagtactaacatttaatagctcctcatatttcgaacgaggtaattgatagagggtgattcctaccggttttccgttactcatgtacgcatcatcaaggtgaccaacacgggtagcgccaagcaaacggataattgcccgtccgtatttggtggtgtcaggaaccatggtgatgctgttaaggaatggtgagttttcgagaagccatttgcagaataatcgatgccattgtagtgcatattcgccacggaatccggggtcatacaccgcatggcattcaacaacgctatgccagaagttacgcacttcatgaactccagccagcactaatccttcgtagatgccgagatataccgcatcaggcttgatgtagtatttatctccactgtctacgatattccccgtgtttaccgggttgttaaggaattctgcaagtttcaccgggttatcgatgagctttatttccatcactgctccgcaatgattttgatggttgtggcagtaaacgccgcgccattcgactgaatggttancgtgctgccatttgtggcaagaaagccgtctttatccacgctgaagaacgtagctaacaggatgttgtcggttgttgttgccgagttgcgactgcttactagcgtgtcaggaacagaaccggagaatgttagctgcattgacctgttggcggttccgctgggccacgtcccgacaatcgacagcttgaagaacaaggttttgttctcgttgaacacaaccatcttgttgttaacggtgtcgaagaatggtgccaacgtcccggatgacggcgtaagcgttttcagcaggctaacaaggttggtcggcgctgtcgggatggttactgatacgccagagtaaacaacctctgacttcttgcgcgtagtggcatactccagagcattaatgcgcgtttcatggtctgaaacctgcgattccagcgactgaactctggtatcaagcgatgcaatatcgctttcattcaaggcaatcagtgggtttacgtcatggagtgggctcaacaccagtcagagccgcatgtacacgcaataatcatggtgaacgaaagaagcattaatgggcaagctggcaaaattgtcagcaaatgggtaacactggcaaacaatgcaatcccatcaaatgttcctccccagtgggatctagatttgaaaggtcagcaatattcagagcctacaaagtgtataggtaaacagattgattacatggcaaagcccgaaactaagttaaatgactttaatagagaggcgagcaagagcctatatgattggtcagatgccaacgtttggggttattcgaatggctgggcgcggcatgagataaaaaaagaaacactttctatcactggctttcatgctgtaagacgcatactaaaagccgttcaggcatcaaggaaagacaactacaaagctaagcgacagatacagcgtacattgaaacgacaagacataaatcgatcaccaatcaccccgttccaagcaccgttaattagcaaacacgattgggatttatcagtgatagcggtcaccaaagaggcagagacagagcgcagggaattactatcctcacagataataaactcgaacaaagtacaaacccacccactgttaaggatgttaagaagagcacgagtgagagcatccagagccaaaagagaaagcggaggttatgaccattactactagtagtgacagatcgtgacaaggcggtgcaaaaaacgaccaataataagagagatatgcctgccaaaccgccaaaagcgcggagcgcggcaaacgccgcgagaggcgcaagaaggcgaacctatccattgaaacggtcagaagcgcatcgcgctcgacgaccgaagtccccactaacaccgttaacgaaagatcaaagtcttagaaaaaaatgacgtttctttgatggacttccatccgtaaaaatcaaattttgagaaaaagtacttatagaaattaatcgctctataaggataagttgacgttagtttaaagtgataaaacattaaagaaaaaacgtaaaatcaaatacataaaataagtcaccaagggatcattttcagaaaacaacgtcaacgtaacgtcaactctgtaagaacttttttggtcactttttgggttgaatgtacgtaaaaatccccagcagtgaaatttgagcgcgtaagcacaattctgaggggctttttgtctgtaggttaggcagtgtaactaacaatacaagaagttagctctgactaactatttaattaacttttcaatctaattgcgttagatattataccctaacgcaatatttttaattcaataatgtctgtaaattgttattacttataattatacatttaactatatctacattggctgcttccaattactacttacgtaacggaatctcggatcctctgtttttggctcggtataataagaatcatcaatagtaaagttcgacgctaatttatcccgaagcccacctaaacgttcaatgcttgttagttcgttagtaacatccttgaaaacggtagaaaatgctttatgttgtttagacttcataaattcaggagtgctcagtgcaaactctttatcaggcaaacctggaatacccacgagtcctgtcaatgaatttatacattttatcaaaaaactgccttgaataccttgatttgatggaacaccgtagcttcgtttaatatctccagatattttatctaaatcacttagtaattttgttacttttttatttcctgcacttatccccgattcatcgtaggtcacatgaatctctcggattacatctcgacacgtacgaaaatgatcatgtgttctaagctctaaagctgaattgataacttgagagacatttcctgtttcgtttgctagccatgcagaaaatattggtaaatctaatgaaatagtagatgtgcgtccatgatctacaatttcagatcttgcagtactgattttatcagacaacgattgcaccaaccttgcagtataatcatgaccaaaagcacctgtttttttcatccaatgcaattgatatgcatgccttattggatgaataaatgagtctgctttaaaatgcttagcaatgacgctgtaataaatagatttatatgccaaccaatttagcgatgcgataaacatttcaagtgaacgagtcatacctcctttaccgcgagtagatttttccctttctagttcaaattcacgctcagtatattcatgtccagatgaactcactagcttcacatcggttgaccagtaccctttcgtatcagaagcatctgataattcattaaaaatcgatgcacttagttcactatatttcgcatattcaggagtaccgggctgaccaagcattttcattgttaagtaatacacgctagaccgaagatcccatgtgcaaatcatattcagcttaagcatctctacaagttgcctaaaatcatcgtcaacaaactccccacctctaatttcgggagtaatttgccgagattcaacttgtgctaactgatcaagttcactgagttgaaaatcactttcagatacaaatttaataaagtcaaatttagcaatgcgtttatctctatattcttttttataattatctacacagatcagggtatcgtaaaaaagtatcgcttgaataagattttcaaaagcgactaaatctccgttaatagtatctggattcttaacaagaatatcacccagtgttctttcgactgctgttaacgaagcattatcaatcaacgcataagacattaaactacctccattagataatatttaataacattatatttcaattaggt

SEQ ID NO: 1348 - DNA, 3964 bp, Escherichia coli
  Strain O55:H7
  modified_base (2642)..(2642): a, c, g or t
attgtgatacttatgacagatttgagtgacattttatcaatctactgattttgatggtgaaatttattagaaggtatgcgtagtgctacgggagaaatgagaaacgcgcccagcaatggcgcatcctttcttaagcaagttggctagtatctatagcatccatccaatcaggagcaattcccaaacgttccgcgaactcttcattggtcacgtcttccattgagagactagccagacaatcgttaatttcagaatagacgggggaaagtaataggtattcccgcaactctttcaggtctttttccatcttaacactccttgttaatagaccgtcgaacaatggtacagatttgtaccattccaagtactggcaagcaaccccaccagcacaacaaattatctcatacggtaaaaacggtgtcgggctgtttctttcggctagctcaatatatcaccttaaacaccagccgttatcattgtctcaattgggtataccgtaatgacaaggtgatacaaagtctcaatagggttgtataggaacattttgactacacaaactgcattatgtatcatttgcacttatattcacaacccttttgagacaatgcaatgaacgttagaatttactgccgagcatcaactgaggggcaacacgctgatcgagcacttaccagcctacgtgaattttcaaaatcaaaaggctggcagattgcaggagagtatatagaaaatgctagcggggcgaagcttgagcgcgtagagcttatgcggctattgtctgaagcccagtccggcgatctgttgctagtggaagctatagatcgtctgagtcgcctagaacatagtgcatgggtcgaactgaaagatacgctcaaccgaaaagggttaatcatcgtatcaatggatttaccaacgagctggcagatggtcgagatggcaggcaatgatctaaccagcggcatcctgagagccgtaaatgccatgttgattgatatccttgccacaatggcacggcaggattacgaaacacgccgtaaacgccaacagcaaggcattgaacgagctaaaagcgaaggcatatacattgggagggcgaaaaatcaggaagcccgagagatcgttagagagatgttggagcaaggagtaaaacctgaactcatcatgaaggcagcaggaatcagccgagcgacttactaccggataaaaaacgagctattgatcgtaaaatcagaataaaatttgaaaggtcgtcaggcttgtttcatcaggtaaaaaccagcatttctgatcacaacgcttgggggcacctattggggcactcaccaaaatcgaaagagaaataaactacaattcaaattgttagctaatttttcgattcctgcagggacaccagatacccttcaaaccaaatctaccttcatcccgtaaacgatgggtttggcagcacacttgccctatatctactcatttttactgcaacaggttgaaatctcagcactgtcagaaagcgctgatgactaaacagcccagggccgggcgatgtaaccatcacacagaatcctgatagcgaaatacggcgtgactcgatacttcactccgcaatgcattccttgatgaattcgcaggcccgtgatacacgggacaggtcgcagaatgacgacaatgtcctggaaatcagcgaaccgtgtatccggagtacatttgagcgactgtaccagaacatgaatgaggtgtttggattaggcgattattagcagggctaagcattttagtattattattttccggttgaaggatatggagatatcgacaacaaccggaaaaagtttacgtctatattgctgaaggtacaggcgtttccataactatttgctcgcgttttttactcaggaagaaaatgccaaatagcaacatcaggcagacaatacccgaaattgcgaagaaaactgtctggtagcctgcgtggtcaaagagtatcccagtcggcgttgaaagcagcacaatcccaagcgaactggcaatttgaaaaccaatcagaaagatcgtcgacgacaggcgcttatcaaagtttgccacgctgtatttgaagacggatatgacacaaagtggaacctcaatggcatgtaacagcttcactaatgaaataatccaggggttaacgaacagcgcgcaggaaaggatacgcaacgccataatcacaacaccgataagtaatgcattttttggccctacccgattcacaaagaacggaataatcgccatgcacagcgcttcgagtaccacctggaatgagttgagataaccatacaggcgcgttcctacatcgtgtgattcgaataaacctgcataaaagacaggaaaaagttgttgatcaaaaatgttatagaaagaccacgtcccaacaataaatatgacgaaaacccagaagtttcgatccttgaaaactgcgataaaatcctctttttttacccctcccgcatccgccgctacgcactggtgatccttatctttaaaacacatgttgatcatcataaatacagcgccaaatagcgagaccaaccagaagttgatatggggactgatactaaaaaatatgccggcaaagaacgcgccaatagcatagccaaaagatccccaggcgngcgctgttccatattcgaaatgaaaatttcgcgccattttttcggtgaagctgtcaagcaaaccgcatcccgccagataccccaggccaaaaaagagcgcccccagaattagacctacagaaaaattgctttgcagtaacggttcataaacgtaaatcataaacggtccggtcaagaccaggatgaaactcatacaccagatgagcggtttcttcagaccgagtttatcctgaacgatgccgtagaacatcataaatagaatgctggtaaactggttgaccgaataaagtgtacctaattccgtccctgtcaaccctagatgtcctttcagccaaatagcgtataacgaccaccacagcgaccaggaaataaaaaagagaaatgagtaactggatgcaaaacgatagtacgcatttctgaatggaatattcagtgccataattacctgcctgtcgttaaaaaattcacgtcctatttagagataagagcgacttcgccgtttacttctcactattccagttcttgtcgacatggcagcgctgtcattgcccctttcgccgttactgcaagcgctccgcaacgttgagcgagatcgataattcgtcgcatttctctctcatctgtagataatcccgtagaggacagacctgtgagtaacccggcaacgaacgcatctcccgcccccgtgctatcgacacaatccacagacattccagcaaaatggtgaacttgtcctcgataacagaccacccccccttctgcacctttagtcaccaacagcatggcgatctcatactcttttgccagggcgcatatatcccgatcgttctgtgtttttccactgataagtcgccattcttcttccgagagcttgacgacatccgccagttgtagcgcctgccgcaaacacaagcggagcaaatgctcgtcttgccatagatcttcacgaatattgggatcgaagctgacaaaacctccggcatgccggatctccgtcatcgcagtaaatgcgctggtacgcgaaggctcggcagacaacgcaattgaacagagatgtaaccattcgccatgtcgccagcagggcaagtctgtcgtctctaaaaaaagatcggcactggggcggaccataaacgtaaatgaacgttccccttgatcgttcagatcgacaagcaccgtggatgtccggtgccattcatcttgcttcagatacgtgatatcgactccctcagttagcagcgttctttgcattaatgcaccaaaaggatcatcccccacccgacctataaacccacttgttccgcctaatctggcgattcccaccg

SEQ ID NO: 1349 - DNA, 30 bp, Escherichia coli
  Strain O55:H7
  modified_base (2)..(2): a, c, g or t
gntagctggcgcgccgccaggacaaggcag

SEQ ID NO: 1350 - DNA, 2389 bp, Escherichia coli
  Strain O55:H7
  modified_base (223)..(223): a, c, g or t
  modified_base (228)..(231): a, c, g or t
  modified_base (234)..(237): a, c, g or t
  modified_base (578)..(578): a, c, g or t
gcccgtctgattctggcaagagatctacgacccgcatcccctaaaacccatactttggctgacatttttttcccttaaattcatctgacttacgcatagtgataaacctctttttcgcaaaatcgtcatggatttactaaaacatgcatattcgatcacaaaatgtcatagttaacgttaacatttgtgatattcatcgcatttatgaaagtaagggactttnttttnnnnaannnnaacgttaacaattcaccaaatttgcttaaccaggatgataaaaatgacgcaatctcgattgcatgcggcgcaaaacgcactagcaaaacttcacgagcgccgaggtaacactttctatccccattttcacctcgcgcctcctgccgggtggatgaacgatccaaacggcctgatctggtttaacgatcgttatcacgcgttttatcaacatcacccaatgagtgaacactgggggccaatgcactggggacatgccaccagcgacgatatgatccactggcagcatgagcctattgcgctagcgccaggagacgagaatgacaaagatgggtgtttttcangtagtgctgtcgatgacaatggtgtcctctcacttatctacaccggacacgtctggctcgatggtgcaggtaatgacgatgcaattcgcgaagtacaatgtctggctaccagtcgggatggtattcatttcgagaaacagggtgtgatcctcactccaccagaaggaatcatgcacttccgcgatcctaaagtgtggcgtgaagccgacacatggtggatggtagtcggggcgaaagacccaggcaacacggggcagatcctgctttatcgcggcagttcattacgtgaatggactttcgatcgcgtactggcccacgctgatgcgggtgaaagctatatgtgggaatgtccggactttttcagccttggcgatcagcattatctgatgttttccccgcagggaatgaatgccgagggatacagttaccgaaatcgctttcaaagtggcgtaatacccggaatgtggtcgccaggacgactttttgcacaatccgggcattttactgaacttgataacgggcatgacttttatgcaccacaaagctttgtagcgaaggatggtcggcgtattgttatcggctggatggatatgtgggaatcgccaatgccctcaaaacgtgaaggctgggcaggctgcatgacgctggcgcgcgagctatcagagagcaatggcaaacttctacaacgcccggtacacgaagctgagtcgttacgccagcagcatcaatctatctctccccgcacaatcagcaataaatatgttttgcaggaaaacgcgcaagcagttgagattcagttgcagtgggcgctgaagaacagtgatgccgaacattacggattacagctcggcactggaatgcggctgtatattgataaccaatctgagcgacttgttttgtggcggtattacccacacgagaatttagacggctaccgtagtattcccctcccacagcgtgacacgctcgccctaaggatatttatcgatacatcatccgtggaagtatttattaacgacggggaagcggtgatgagtagtcgaatctatccgcagccagaagaacgggaactgtcgctttatgcctcccacggagtggctgtggtgcaacatggagcactctggcaactgggttaacataatatcaggtggaacaacggatcaacagcgggcaagggatccgcgtcacacttcccccttcacgaccttcaataatatgcaatgcagcttcccgcccgataatgtcatgtggaagctgaattgtggtcagcggcggtaaaaacagatgcccgacgccaaccagattatcaaagcccattacggcgacatcctgcgggatacgtacccccttagccaggagaacctgataagccacaaaggctgcgcgatcgttaccacatatcagaacatcaaaatctggtttgcccgatttgaagtggtcattgagtaaacttgcgagatcggtgtagtgatcatcacctgttgccatgtgaaattgtttcacctcagccagatctcgtccagcatcacgccaggcctgctcaaatccctgccgacgataccctgttgccaacgcactttccggtagccagaagcataacggttgacgatagcccgccgcgagcaaatgctgtgttgattcatattgtgcagtgtaatcatcagggatataactgggtaacgctgggtcatccgccacacagttcgccaatacaatattttcaccatacagagactcaggtagcgtgatatgtcgcagccccattgtagtatagataatgccatccggacggtgggcaagcagctgacgtg

SEQ ID NO: 1351 - DNA, 5356 bp, Escherichia coli
  Strain O55:H7
  modified_base (3)..(3): a, c, g or t
  modified_base (650)..(650): a, c, g or t
  modified_base (3300)..(3300): a, c, g or t
  modified_base (3323)..(3323): a, c, g or t
  modified_base (3582)..(3582): a, c, g or t
  modified_base (5334)..(5334): a, c, g or t
  modified_base (5339)..(5339): a, c, g or t
  modified_base (5341)..(5341): a, c, g or t
ggnagcgtcatcttcagaaaaaatattgattaaaaaactattccagccgaactcgctggcggtttgctcaatggcaagcagaatatcaacagagaaaggagtggtagcagtgtcctgcgccagcacggcgagagtcgacggcttacgtccttgagcgcgcatcttacgggcggaaagatcaggaacataattcagggtctggattgcctgcaatacgcggtcacgcgttgcaggacgcacagattctgcattatgcatcacccgggagactgtcatcatcgacactcccgccaggcgtgcgacatcctttaatgaagccatacccaagccgtttgccgtaaaacgggcactgtagcagaaacagacgtcactggcgagatccaacgaaattctcgacgccctatcacccgacacggcaatacaataaaaaataacaataattgccggataattgtacccaattccgcctctgttctcgccaacgagtgaccatataggcaagtaagaaaaacatgccaactggcatcgccaacctggagaagaaaatataaatatggatcattgtgctgccgctgtatcccgacatcagcccggaaattattgcgattgctatcggttcaggcgcgattggctgcacgatcgttacggantcgcttttctggctggtgaagcaatattgcggcgctacgctcaatgaaacatttaaatactatacgacagcgacatttatcgcttcagtcgtcgctctggcgggcacattcctgctgtcatttatcatctaagcgcaaagagacgtactatggaaaacgctaaaatgaactcgctcatcgcccagtatccgttggtaaaggatctggttgctcttaaagaaaccacctagtttaatcctggcacgacctcattggctgaaggtttaccttatgttggcctgaccgaacaggatgttcaggacgcccatgcgcgcttatcccgttttgcaccctatctggcaaaagcatttcctgaaactgctgccactggggggattattgaatcagaactggttgccattccggctatgcaaaaacggctggaaaaggaatatcaacaaccgatcagcgggcaactgttactgaaaaaagatagccatttgcccatttccggctccataaaagcacgcggcgggatttatgaagtcctggcacatgcagaaaaactggctctggaagcggggttgctgacgcttgaagatgactacagcaaactgctttctccggagtttaaacagttctttagccagtacagcattgctgtgggctcaaccggaaatctggggttatcaatcggcattatgagcgcccgcattggctttaaggtgacagtgcatatgtctgctgatgcccgggcatggaaaaaagcgaaactgcgcagccatggcgttacggtcgtggaatatgagcaagattatggtgttgccgtcgaggaaggacgtaaagcagcgcagtctgacccgaactgtttctttattgatgacgagaattcccgcacgttgttccttgggtattccgtcgcaggccagcgtcttaaagcgcaatttgccgagcaaggtcgtattgtcgatgctgataaccctctgtttgtctatctgccgtgtggtgttggcggtggtcctggtggcgtcgcattcggacttaagctggcgtttggcgatcatgttcactgcttttttgccgaaccaacgcactccccttgtatgttgttaggcgtccatacaggattacacgatcagatttctgttcaggatattggtatcgacaaccttaccgcagcggatggccttgcagttggtcgcgcatcaggctttgtcgggcgggcaatggagcgtctgctggatggcttctatacccttagcgatcaaaccatgtatgacatgcttggctggctggcgtaggaagaaggtattcgtcttgaaccttcggcactggcgggtatggccggacctcagcgcgtgtgtgcatcagtaagttaccaacagatgcacggtttcagcgcagaacaactgcgtaatgccactcatctggtgtgggcgacgggaggtggaatggtgccggaagaagagatggagcaatatctggcaaaaggccgttaataacgtttcaacgcagcatcgcaatcctttccctgggtgagcgatgctgccgatggcgcagacttaagatccccagtcttacccgctataaccccctgcttttaccatcacccaacgcctttcgctgtaaacggcggtttcgcaaaccaaaccaaaaccgtaagtaagataaaagcaatagccgccatacggaaaatctcatttgcagaaatagaaagtgactgctgggttatttcattattaatttcattaagaactcctgaaagcgaaccatagtatttatccataatttgtgacgatgaattaaacacggggttaaattgatcgatggttgctgtcaactgactatggtgtaacgattcgcgtcgtccccacagcgtcattgtcaacgacgtaccaactgatcctgacaaggtacgaaaaaaattactcatactcgaggcattggcaaatttattatctggcaagcctgaaaacgaaatcgttgttaagggtaaaaagaaacaggcaacggcgaatccctgaaaaaactgtggcaaaatgatacctgtaaaatcaatcgttggcataaatgtcacagaacgccagtaatagcaaaccgcatacatcaaaaaactgaatgtcaccaacacccgcatgtctattttgttgccataacgtcctatcaaaggtgaaattaatagtggcatgatgccgatgggcgcataagcaagtccggcccatatcgcattataccccatcgtttcctggagtaactgcggcataaggacgatcgctccagagtaaaataaatacgcgcatgtgatactcacaataccaatggtgaagttacgggacttaaacaaactgagatcaagaatcgggttctctgaggtcgactcccaaatgactaaagagatcagagaaataactgatactactgttaatattattattgtactcgagttgaaccaatccagatcgcgccctttatcaagcataatttgcaagccaccaacaccgagcactaacagggtcagtcctggtagattcattttgaccggtgaagtctcagtttctcttcctttaagtaaggttaagcataatgtcaggacgataatccccatagggacattgattaaaaatatccaaccccagctaaagttatcacaaatataaccgcccaatatcgncccacatatcggagcgataatcncggtcattgaccataatgccagagcaaatgttcttttttctggtggataattccttaataataaactctgtgacagtggaattaacggccctgccattaacccctgaacgactctaaaaaatatcagcacatcaagattggtcgataaactacacattaaggaagacagcgaaaaaaaagtgactgaaagtaaaaataaccttaattcgcctattctttgtgccagcctgccggtaacagggatcgcaatggcatttgntacgccaaacgaggtgataacccaggtgccttcgtctgttgatgctcccagaaagccagatattgtcggtattgcgacgttagaaatagtggaatccaacatttgcataaacgtcgctaatgacaatgcaatagtgacgcaccataacgtcccaccggttaatggtgccggagttgatttagtgattgccattaaagttgtccattatgcgaaataatgttgctaatttctttttctatcggactggtatcgataactaaagccttactggtataagccgggatggacgtcacggttgaagccagctcaggcatctcagcaatgtcttcgttcttcgtatcaatagttgcagtcatcgataaaccaatgcgcaaggggtgttccatgagttcttttggatcaagagaaacttcaaccggtacacgctgaacgattttgatccagttccctgtcgcattttgtgcaggtaataaggagaacgcattgccggttcccatattgatccctgtcacccggccatgaaacacaacattctcaccataaagatcgctgataatattgaccgattgaccaatccgtacatccgtgagttgtgtttctttaaagttagcattaacccacatttgacgtgccggtacgacagccattaacgattgtccgggactcactgtttcgccgacctgaacacttctctgggcaatatagccggtaaccggactcttaatatccgtacgtttaagcgccaaccaggcttctttggttgcatccgcagcttcaacgacttgtggctgacggtttaatggtgtgttcattactaaagctttattcgctttataagcctggatagcggcattcaatgccgctttgctacttattaacgtatctttggtatgctccagcgtttcttttgaaataaccccctgcttcgctaaaggcacacgacggttataatcttctaaagattgttgatactgaatacgtgctgaagcgacttcggcactgtattgtttatcctgtaagtacagtttattcgtttgccgaacaatatttgccagattatttttagctttattgagtgcgatagtggcatcagttttatccagtgaaactaaaatgtcaccctgtcgaacgtagttcgtatctttatgattaacgacagtgacactacctgagacttgtgcagaaattggatctgcattccccgtgacataggcgtcatctgtactaatcatgtcttctaattccattgaccaataggcataagcacctgaaaacgcaataaataaaactatcgccaataaagaaaagtattttcttctgttagaatgttttttatttgaattaatctgttccactattatctctcatttcgcatagatgaaatttatgaattgaatgaaaagagtattcattcttcatatcaaacacagtgcatgtgttgcacattatcccaggaacgttggaggcctaatttaaatgaggtgcaaaaaaaacaacagaggactaaaccgtggcttttgcaatacaattcttacgcctgtaggattagtgagaagacttatagtgctaacttgaaactataaatcatcggtataatccctgattttattgttgacatttcatatatgccgactatttatatggtatacttgtcgaattatcttaaaggaagctcaaattttcttatttttattgagaaaatgagatgatgccttatgtctgtattactacagggagaagggagatgcttcnttgcnangggaataatctatga

SEQ ID NO: 1352 - DNA, 6760 bp, Escherichia coli
  Strain O55:H7
  modified_base (240)..(240): a, c, g or t
  modified_base (242)..(243): a, c, g or t
  modified_base (1086)..(1086): a, c, g or t
  modified_base (1966)..(1966): a, c, g or t
  modified_base (4437)..(4440): a, c, g or t
  modified_base (5532)..(5532): a, c, g or t
ttattgatgaccatcctcttgctatcgcagcaattcgtaatttattgatcaaaaacgatattgaaatcttagcagagttgactgaaggcggaagtgccgttcagcgggtggaaacacttaagcctgatatcgtcatcattgatgtcgatatccccggagttaacggtatccaggtgttagaaacgctgaggaagcgccaatatagcggaattattattatcgtctccgctaaaaatgacnanntttacgggaaacattgtgctgatgctggcgctaatggtttcgtgagtaaaaaagaaggcatgaacaatatcattgcggctattgaagctgcaaaaaatggctactgctatttccccttctctctcaaccggtttgttggaagtttaacgtccgaccagcaaaaactcgactccttatcgaaacaagaaattagtgtcatgcggtatattcttgatggcaaggataataatgacattgctgaaaaaatgttcatcagcaacaaaactgtcagcacttataaaagtcgcctgatggaaaaattagaatgtaaatcactgatggatctttacacattcgcacaacgtaacaaaatcggctaaccacatgaagtttttaccctatatttttcttctctgttgtggtctttggtcgaccataagtttcgcagacgaagattacatcgaatatcgtggcatcagtagtaacaaccgtgtcacacttgatccactacgtctgagcaacaaggaattacgttggttagcgagcaaaaaaaatcttgtgattgcagtacacaagtcccaaacggctacgttgttgcataccgattcgcagcaacgggttcgtggtattaatgctgattatttaaatcttttaaaaagagcgttaaatatcaaattaacactccgggaatacgcagatcatcaaaaagcaatggacgcgctggaagaaggtgaagtcgatatagtgttatcacatttagttgcttcgccgcctcttaatgatgacattgctgcaaccaaaccactgataattacctttccggcgctggtcaccacccttcacgattcaatgcgaccgcttacntcatcaaaaccagtaaatattgctcgagtagcaaattatccccctgacgaggtaattcatcaatcatttccaaaagcaacaattatctcttttacaaatttatatcaggcattagcatccgtctcagccggacagaatgattactttattggtagtaacatcattaccagcagtatgatttcccgctatttcactcactccttaaatgtagtgaaatattataactcaccgcgtcaatataacttcttcttaaccagaaaagaatctgtcattcttaatgaagtactcaatcgatttgttgatgctttaacaaatgaagttcgctatgaagtatcacaaaattggcttgatacaggaaacctggcctttctgaacaagccattagaactcactgaacatgaaaaacagtggattaagcagcatcccgatttaaaggtgctggaaaatccttactcgcccccctattctatgacggatgaaaatggctcggttcggggcgttatgggggacattcttaatattattaccttgcaaacaggtttaaatttttctccgatcaccgtttcacacaatatccatgctggaacacagctgaatcccggcggatgggatatattacccggtgctatttatagtgaagatagagaaaataatgttttatttgctgaagccttcataacaacgccttacgtttttgtcatgcaaaaagcgcctgacagtgaacaaacattaaaaaaaggaatgaaagttgccattccatattattatgagcttcattcgcaattaaaagagatgtatccggaggtagagtggataaaagtcgataacgccagcgctgcatttcacaaggtcaaggaaggcgaacttgatgctctggtcncgacacagttaaattcacgttacatgatcgaccattactatcctaatgaactgtatcattttcttattcccggcgttccgaatgcatcgctttcgttcgcttttcctcgcggagaaccggaacttaaggatattattaataaagcactgaatgcaatccccccaagcgaagttctgcgcctgaccgaaaaatggattaaaatgcccaatgtgaccattgacacatgggacctctatagcgagcaattttatattgttacgacattatccgttttattagttggcagtagccttttatggggattctacctgttacgctcagttcgtcgtcgtaaagtcattcagggtgatttagaaaaccaaatatcattccggaaagcgctctcggactccttaccgaatccaacttatgttgtaaactggcaaggtaatgtcattagtcacaatagtgcatttgaacattatttcactgctgattactacaaaaatgcaatgttgccattagaaaacagtgaatcaccctttaaagatgttttttctaatacgcatgaagtcacagcagagacgaaagaaaaccgaacaatatacacacaggtatttgaaattgataatggcatcgagaaaagatgcattaatcactggcatacattatgtaatctgccagccagcgaacatgctgtttatatttgtggttggcaagatattaccgagacgcgtgatttaattcatgcactcgaagtagagagaaataaagcgatcaatgcaactgtcgcaaaaagtcagtttctggcaacaatgagtcacgaaataagaacaccaataagctccattatgggcttcctggaacttctgtcgggttctggtcttagcaaggagcaacgggtggaggcgatttcactagcctacgccaccggacaatcactcctcggcttaattggtgaaatccttgatgtcgacaaaattgaatcgggtaactatcaacttcaaccacaatgggtcgatatccctactttagtccagaacacttgtcactctttcggtgcgattgctgcaagcaaatcgatcgcattaagttgcagcagtacatttcctgatcattacctggttaagatcgaccctcaggcgtttaagcaggtcttatcaaatttactgagtaatgctctcaaatttaccaccgagggggcagtaaaaattacgacctccctggttcacattgatgacaaccacgctgtaatcaaaatgacgattatggattctggaagtggattatcacaggaagaacaacaacaactgtttaaacgttatagccaaacaagtgcaggtcgtcagcaaacaggttctggtttaggcttaatgatctgcaaagaattaattaaaaacatgcagggtgatttgtcattagaaagtcatccaggcataggaacaacatttacgatcacaatcccggtagaaattatccaacaagtggcggctgtcgaggcaaaagcagaacaacccatcacactacctgaaaagttgagcatattaatcgcggatgatcatccgaccaacaggctattactcaaacgccagctaaatctattaggatatgatgttgatgaagccactgatggtgtgcaagcgctacacaaagtcagtatgcaacattatgatctgcttattactgacgttaatatgccgaatgtggatggttttgagttgactcgcaaactccgtgagcaaaattcgtccttacccatttgggggcttacagccaacgcacaggctaacgaacgtgaaaaagggttaaattgcggcatgaacttatgtttgttcaaaccgttgaccctggatgtactgaaaacacatttaagtcagttacaccaggttgcgcatattgtacctcagtatcgccaccttgatatcgaggccctgaaaaataatacggcgaacgatctacaactgatgcaggagattctcatgactttccagcatgaaacacataaagatttacccgctgcgtttcatgcactagaagctggcgataatagaactttccatcagtgtattcatcgcatccacggtgcggctaacatcctgaatttgcaaaagttgattaatattagccatcagttagaaataacacctgtttcagatgacagtaagcctgaaattcttcagttgctaaactctgtaaaagaacacattgcagagctagaccaggaaattgctgttttctgtcaacaaaataactaaatagtggctcccacaatgttcaaatgtgggagctatttaccagcacatcttacatttatgatgagaactcctggcgaatttgctccccatgctggtcgagcgttgccgctcccggcataacatgcgggtccgcgcagccactgatttttatcggattacccggcatcattattcccccggcttcaatcaacatatttctcgcctgagtttgtggcaaattaatggcctcagccacannnnataacggcgcgacgggcacaccaacttcatgtattctggctaaccaaacttcagctgcctgtgtttttaacgtccgctcaatatattgtttaagaatagtctggttttgtacgcgtaaaatattgctgctaaatctgggatcattaaccagttccgtaagctccagtgccaggcataacgcagagaaaagcttgtcattaccacaacaaatcgtaatcggcttatcctgagtatcgaaaacatcaaaaggtgccatgtaggggtggcgatttcccaggcgttgtggtgacttccctgtcgcaatatatgccatcagaccatgctccagaaaactcagcgtggcatcaaacatcgctatatcgacatgcgcccctctttggctcttttcgcggccataaagtgcactcactattccgctgaataaataaacaccgccgcatagatccgcaagagaggtaccaacacgcactggcggagcatcagggtaccctgtttccatcattatcccgctcattgcctgaatgatggtatcgtaggcaggagcatcttttagcggaccggtatgtccgaaacctgacgatgaagcatatatgaggcgcgggttgatttcttgtaacctttcccatgaaagccccagtttttccattgtacctgggcgaaaattctcagctaatacatcagcttgtttaagcatatttataaatatacttttatcgtgatcattctttaaatcaagaaccacactctctttaccatgattaataaaactgtaatagagtgtccatccacatagggaccaaatgtgcgggtatcatcaccatgacccggcggctcaactttaattacccttgcgcccatattacaaagaagttgagttccgaaaggtccattaaggacatgtgtcatatcgataactaataagccttcaaacggccctttgctttcattatttgtcatttgcttatgccttgaaaaaagccgaaggtgaaaagacacttcggcatttatgtaaaatcaataacatgattaattatgaaaccagtcgactgacataaatccacaagggagccgtgacgacaaaacccagtacgntcacagccaatgacgctgtaccagtgcgggtgtagacattaaaccggctggcaataatgattccggagaatgccggcggtaatgcgcctgccagtaccatcatctgcagatgttcgctgttcaaatgacatgccataccaacaagaagcagcgccagtggcatcagaatcagcttcaggaaggtgttataagcaatttcggcactgaactcgaatttatgtgcagccagagtcaaccccgcagcgaataccgctacccctgagttagccttcgcaatcagattaaaggttgggtcccatgctgccggaatttttaccccaaccaacaccaggatcgttgccagaacaggtgcccatacaactggctcctttgccgcagaaattaatgcgctcagattactattcttcttaccatccgctcctgaggaaggattcagcaaatacagaccaataggaatagtaattgcgttaacaataatagaaataattgctaccactaaacctgttgatacggaatcaccataaataggatcgagaactgcaaaccccaggaatccaatggtaggtgaacctgcaattaatgcacatacagctgcttctgcatgggtacgtttaaaaaatttgtagcaaccaaaccaggagaaaaagaaacatccgacaataaccacgagtgatacaagggtcagacgagtgtccgcaaaaatcatttccctgtttgcccgggtaatagaaacaaatagggctgcaggaagcgcgtagtttaataccagtttattaaatgcccgggcttgatcttctgaaaaagtttctcgtctgccgctaaaataacccaacagcatgattacgataataggcaataaatcgccaataaaaaatgttagcataatagtatttccgataagggtcccctcaccatcgcataatgagttggcaagaggagacgatgtcagtatttaattaccagcgacttgttttgggttaagtttggtaatatggccactttcagttcctgctgcagggtcgatgaccacattaataatggtcggtttgcgcgactgaataccggtggttaaagcatgacgaagttcatctgtcgtggtgacgttatagccaacgccacgaaacgcatccattaatttgtcataccttgcatggtgcaacagatctgttggtgatggtgcaccagcgccactgagatcaacaccgtctcctctgtagatgccgccatt

SEQ ID NO: 1353 - DNA, 4836 bp, Escherichia coli
  Strain O55:H7
  modified_base (782)..(783): a, c, g or t
  modified_base (785)..(788): a, c, g or t
  modified_base (1293)..(1294): a, c, g or t
  modified_base (1435)..(1438): a, c, g or t
  modified_base (1534)..(1534): a, c, g or t
  modified_base (1791)..(1791): a, c, g or t
  modified_base (2978)..(2978): a, c, g or t
  modified_base (3409)..(3409): a, c, g or t
  modified_base (3451)..(3451): a, c, g or t
  modified_base (3453)..(3456): a, c, g or t
acgatcgttaccggcaggttatatcgacaaatcgtttcaatttccatcccactgaaaccaaaagcactatcaccttcaatggcgacaaccggagaaccagaggtcacgctagcaccgatggcatagcccataccgatgcccatgacaccccaggtaccacaatccagacgacgacgtggtttatacatatcaataatatttcgtgcattatccagggtatttgcaccttcattaactaaataaatatcctggttctcacgcaatacatcgcgcacagcacttaatgcattaaagtaatttaatggttgggtatctgtacttaatttttcatgcattttttgtgcattttgctgcttgtggatatttaaaatatcgcgccataccagtggagtcgtaaatgtgttttgtttcagctctgccagcataccttgcatactggatgcaatatcgccaacgactggcacagcaatggggcggttgctgtcaatttcctgcggttcaatatccagttgaataaactgtgtatctgccgcccatccttttttaccgtgtgccagtaaccaattcagtcgtgcaccaacaagcatgacaacgtcagcatttgccagggcaaacgaacgcgcagctgccgcagaaagtggatgcgtatcttcgaggatccctttcgccatagacattggcaggaatggaatctgggcactttcaataaattcacgaagctgttcgtcagcttgtgaatacgccgcgcctttgccaaggataattaatggccgttcagcttnngnnnnaagcgaaattgcgctagtgactgacttcgggcatggcaataatgctggcgacggattttcaacttttacaatcgtggttaacgcttcgtctttttccatcgtcgcggccaggacatttgctggcaaatcaagataaactccgccagggcgacccgatactgagacccggatagcgcgtgccaatgcaatgccaagatcctgcggctgattaacgcgaaatgctgctttggcatacggttttgccgcattcatttggtccagctcttcataatcaccttgctgtaggtcgacgatcgcgcggtcgctggagccgctaatcatgatcatcggaaaaccatttaccgttgcgttggccaatgcggtcaaaccattgaggaatcctggcgcagacactgtcaggcagatccctggtttttgggtaagaaaaccgcttgccgcagcggcatagcctgccgactgctcatgacgaaaaccaatataacgaatgccttccgcctgggcatgnngcgccatatccgtcacaggaatacctacaacaccataaatagtgtcaatattattctgttttaatgcttcaacgatgatatgcataccatctgtcatttgaagttgatctgacatgattaataacctcgaaatttttatannnngggagccagaagcccccgttaatatcagatggcgtggttttgcttcattgcagcaatttcatcgtcgctataacccagctcctgcaataccgcagnggtatgttcacctaatagaggcgcagctttaatatccggcgtaaaggcagagaatttcattggacaaccaactgtcagatattttccacgcaatggttgttccacttcgacaacactgccgctttggcgtaaagagggatcaagtgaaatttctttcatacttaaaaccggtgcacaaggaatatcaaactgagtcaaataagccactgcttcatgtttatcaatagtgacagtgtatttttcgatttcagcaaaantatcgaaaatatgtggctgtcgggcatgggctgtactgtatgccggatcggtaatccaatctggtttgccgatggctttacaggtgttttcccagttttgctcctgaatagtgaaataaatataggcgttaggatcagtttcccagcctttacatttcaggatccagccaggctgaccgccaccacccgcattacctccgcggggaactgcatcaccaaatgtgccattcggatactgcgggtattcttccagataacccaatttatcgagacgctgctggtcgcgtaatttcacgcggcaaaggttcaatacggcatcctgcattgacatggtgactcgttgcccacgccccgttttttcgcgatgcagcaaagcagcaagtaaaccgatcagtaaatgcattccggtgttgctgtcacccaacgctgcagcgcttaccagcggcggaccgtcccaaaaacccgtagtggatgccgcgccacccgctgcctgagcaacgttttcataggcttttacattcacataaggcgaacactcatcaaaccctttgatcgaaccaaaaatcagacgtggattgatttcttgaatatgctcccaggtgaagcccatgtgatcaatggcccctggatgaaagttctcgactaagatatcagcttcgcggatcagcttttccattacctctttgccttccgctgttttggtatttaactcaatagaacgtttgttactgttaagcatggtgaagtaaagcgcatcgatatcaggaatatctcgcagctggtgacgcgttacgtcaccaacgccggggcgttcaattttaatgacgtcagcgccaaaccaggccagcatttgagtacaagatgggccagattgcacaccggtgaaatcgagaactttaattccttgaagtggagttgacatagcaatacctattagttaattaaatatgtgttaatttagcgtttatttaaggcataacgccctctataaataatccgcaaaatatcgtcatagcggcactcgatatttttaaattcctgtatcaagtgctgaaaatcatttcatcgctacttccaattcctttctgcatggtaagtagtgaggacgaaaagaagaatatgataaatattggttcgtggtaatcagagagagtcgcgacatttgtgatgttattcttacaactgtnagaagcgccggtgatttacaagtaagggtatgattacgctttttagagcgtaccataaaatataacatattaaatgatttgtgatgacacgggattattgcggtttactttgaggaatataaaatgcgagtttatagaacagcgagcgccaaataattttatgaccacaacctgtcgtattgtggtcataaaaaattgtcggctggagggagttaaatcctttacctcaatatactgcctgtcagcattagttcacaaacagagcttcgctatcgacgatgattccatcttccgcacctttaagcgctaggtttgcctcgtagtattgctttttatcaagcagtttctgcgcatcagcaagtgcattacgagtctgtttaagcggcatcagatattggttttccattacaccaacaccggccaggcgaagntcttccattgcgccctttttatcccctttcgccattttttcntnnnnaatttttatcgcggcttctttttcgggtgtcgctacataactctcagaaattccgacagatgcattaatgacaatatattggtcatcattgacattggtctttttacctggcttagcgaactttgcccattcggtactgtcatctgacaacaaagctgaagcttcattggtcagttcttttgccttttccggatcgccatgaaacagagccaggcgcgctacctgcacgtcacgcatcgcatataaaccttgttcagagatacgctctgctgcagctgccgttttctgggtttgctgaacttgctgagtttgctgttgtgccgctaccggagcattatcagcagcccatacagttgaagatgccagaatagctgtgaccatcgtagccataattaaacgtttcatacttacctcattctttaacagttttagaaaacgccgccatcatattgggtgagcatgaaatgagaaatcagagagcaacggtcattttgaaagggttatcttacagttgtagttattatcgcaagaagtattttagtcttacaattgtaggaatatgcttcctgtcacagagaactattcttatgtaccacaaagagatgtcatttattatatcgatgtaaatattgattaattatatgtaaatacagccataacatcgtacattctcagtgaaccattttcaggataactttctatgaaagtaaacttaatactttttagcttatttttattggtctctattatggcatgcaatgtttttgcattttctaattctggtggtggtagtgagacgagctataaagagccagaaaaaacgtcagcgatgacgacaactcactctacaaaatttcagccatcacaggcgattttgtttaagatgagagaagatgcaccaccattaaacctcacagaagaaaccacgcccccttttccgacaaaggcgaattatcttattcatcctgtgcgatagcgtctgtcacctggcaggtgaacaatcatgtctgatgctgatgtgaacacctgcccaaatgaaccatcctgacccactatcgcctgccataccccaccataaagcgaatcatcaagccacaagccggggcaagaaacataaatatccccgtcaccagttcattaccgccagttaaccacatggtgaagtaataaatgagtgcagcgaggatcaccatgccgaagaaagaagagaccgccgataccacgttcagtacctgaccgatgtatccgcttacgcagacaatacacagggcgagaaacatccataaataaaacatagctcaacctcctgccgcgctaaaaaacctgtaacttcagtcactttaatagtaagacaatccttaacctctggcaatttttgct

SEQ ID NO: 1354 - DNA, 21660 bp, Escherichia coli
  Strain O55:H7
  modified_base (104)..(104): a, c, g or t
  modified_base (2935)..(2935): a, c, g or t
  modified_base (2944)..(2944): a, c, g or t
  modified_base (2952)..(2952): a, c, g or t
  modified_base (3943)..(3943): a, c, g or t
  modified_base (5750)..(5750): a, c, g or t
  modified_base (5986)..(5986): a, c, g or t
  modified_base (7291)..(7291): a, c, g or t
  modified_base (9535)..(9538): a, c, g or t
  modified_base (9782)..(9784): a, c, g or t
  modified_base (12363)..(12363): a, c, g or t
  modified_base (13039)..(13039): a, c, g or t
  modified_base (16169)..(16169): a, c, g or t
  modified_base (16171)..(16171): a, c, g or t
  modified_base (18833)..(18833): a, c, g or t
  modified_base (19530)..(19530): a, c, g or t
caatgaaaacagcatgttaaatgcaatactattgcgtgcggaaaattttttactttgcacgattaataatcagtagctgaaagcagtcagccagtgataaagtncagataccgcattcatgctcctcgtggttatgtcctgactagtctttacactctttacaggaaccattgtcgtacatgatggcccaaccaattgagtgtaccgctgtcgacatggaatcttctgcgatacaacaattcgtatctacagaaggtaactatgtttccacaatgcaaattttcccgcgagtttctacatcctcgctactggctcacatggtttgggcttggtgtactctggctttgggtacagcttccttatcctgttctctgctttctcggcacgcgtattggcgcaatggcgcgaccattcctgaaacggcgtgaatctatcgcccgtaaaaacctggaactttgcttcccgcagcattctgcggaagaacgcgagaagatgattgccgaaaactttcgttcactcggcatggctctggtagaaaccggcatggcgtggttctggcccgacagtcgcgtacgtaaatggtttgatgttgaagggctggataaccttaagcgcgcacaaatgcaaaatcgcggcgtaatggttgtcggcgtccattttatgtcgctggaactgggcggccgcgtgatgggactttgtcagccaatgatggctacctatcgtccacataataatcagctgatggaatgggtgcagacccgtgggcgcatgcgctctaacaaagcgatgatcggcagaaataatctgcgcggcattgtcggtgcactgaagaaaggtgaagcggtatggtttgctcccgatcaggattatggtcgtaaaggcagctccttcgcgccgttctttgcggtggaaaatgtcgccacaaccaatggcacctatgttctctcccgtctctctggcgcagccatgttgaccgtaacgatggtaagaaaagcggattacagcggatatcgtttgttcatcaccccagagatggaaggctacccgacagatgaaaatcaagccgctgcctatatgaacaagattatcgagaaagagatcatgcgcgcaccggagcagtacctctggatccaccgtcgctttaaaacgcgcccggtgggagaatcgtcgttgtacatttaacaaactgctcttactctttccctcctcaaatcggccataataacctcatggtttttatggcttttttcttaagattttttccttcgctgaatatctaattattaccgccagaaattaaactgtcgccgatatgagacacctgtaagctactaaaagtaaataagaaaatgcctcttgtctcgtttcagttttaggcgtacattagcgccgtctcgagcagtttagctcagaattctggggtgatgcccacggtaaaatacaggacttttaaggtcgttttgcccggtgtcaactcactgtatcaggtgtgatgaagtcattcaggcgtaacagtaattacgcggagagatgtaaagtgaaatatttctttatgggcatttcttttatggtcatcgtttgggccggtacttttgccctgatgatctaaaagcaaactgtgcaatgaaaaacaggagccatcaggctcctgtttgcatttctgacgacggtgtttattccgcgttttcgtgaatatgtttgctgctggcgggtagtaaaccgtcggcacggaacatcgctttaatcccacgaatcgcctgacgaatacggtcgcggttttcaatcagtgcaaagcgaacatgcgtgtcgccgtagtcaccaaagccaatccctggagagacacagaccttcgcttcgttaaggagcttcttggcaaattccagcgatcccatggccgcatatggttccgggattttcgcccagacatacatcgaagccttcggcatttcgaccatccagcccgcttcatgcagccctttaaccaatacatcgcggcggcgtttgtactgttcggcaatgtcgcgcacgcactgttgatcgccctccagcgccgcaatcgccgccacctgcaacggcgtaaaagtgccgtaatcgtgatagcttttgattcgcgccagggcactgaccagcgttttgttgccgaccataaagccgatacgccagcccgccatgttgtagcttttcgacagcgtaaagaactcgactgccacatcgcgtgcacccggtacctgcatgattgacggcgctttccagccatcgtagacgatatcggcataggccaggtcatggaccaccagcacatcgtagcgtttcgccagcgccactactttttcgaagaactccagttccacgcattgcgcggttgggtttgacgggaagccgaggatcatcatcttcggtttcggataactttcaagaatggcgcgctccagttcgttgaagaaatcgacaccttccaccagcggcactgagcgtacctgcgccccggcaatcaccgcgccataaatatggatcgggtagcttggattcggcaccagcaccgtgtcaccatgatccagcgtcgccagcatcaggtgtgccagcccttctttcgaaccaatggtgacgatggcttctgattccggatcgatttcaacgtcgtagcgatcctgataccagcgggaaatggcgcgacgtaaccgcggaatgccgcgtgaagtggagtaaccatgcgtgtccggacgctgggccacagtacataatttttcgacgatatgcggcggagtcgcaccgtccgggttacccatgctgaaatcgataatatcttcgccgcgccgacgcgcagccattttcagttcagcggtgatgttaaaaacgtagggcgggagacgatcaatgcgcgtaaagcgacgttcagggcgagtgtcagccataatttcctcagattaacgttagngcccggacngtccgagngacgctgccacgatggtggctgttttgaaaatagcctgattaatttctgtctgtccagcgttttagaacatttttattaatgacgttaaatgaggaactctgctttaaaaacaggaaatttatctgcgctaacaagaaaattaccactcattttattaacataataatttcaataaatttactaaccagaagtgcattatcaagagatgcattgctaatacaccatttatctatcaatccccttttaaaattgtggtttttcctcaaaaacggcctgctggtcatcagccttcaggttacctatcatagaggtttaatccttattcagagtcacccgtgcacgaaatattcaacatgctgctggcggtcttcgatcgggcagcgttaatgcttatctgcctgttctttctcatccgtatccgcctgtttcgcgaactgttgcacaagtcggcacactcaccgaaagagttgctcgccgttaccgccattttctcgctgttcgccctcttcagcacctggtccggcgttcccgtagaaggctcgctggtgaacgtacgtattatcgcggtgatgtccggcgggattctgtttggcccgtgggtgggcatcattaccggcgtgattgcgggtattcatcgttatttaattgatatcggtggcgtgacggcgatcccctgctttatcaccagcattctggctggttgtatatcgggctggatcaacctgaaaatccccaaagcacagcgctggcgcgtcggtattctcggcggcatgttgtgtgaaacgttgaccatgattctggtgattgtctgggcaccaactaccgcgttagggatcgatatcgtctctaaaatcgggattccaatgatcctcggcagcgtctgtatcggctttattgtgcttctagtgcaaagcgttgagggcgaaaaagaggccagcgccgcgcggcaggccaagttggcgctggatatcgccaacaaaacgctacctntgtttcgccatgtcaatagcgagtcattacgcaaagtttgtgaaattattcgcgatgacattcacgccgatgcggtggcgattaccaataccgatcatgtgctggcctatgttggtgtgggtgaacataactatcagaatggcgatgacttcattagcccgactacccgtcaggcgatgaattacggaaaaatcatcattaaaaacaatgatgaagcccaccgcacaccagagattcattccatgctggtgatcccattgtgggagaaaggcgttgtgaccggaacgctgaaaatttactactgccacgcgcatcagataacctcgtcattacaggaaatggcggttggtctgtcgcaaatcatctccacgcaactggaggtttcacgcgccgagcagctacgtgaaatggcaaataaggcagagcttcgcgccctgcaaagcaaaattaatccccatttcctgtttaacgctttgaacgctatttcatcgtcgatccgtctgaatccggataccgctcgccagctgatctttaatctgtcgcgttatctgcgctataacattgaattaaaagacgatgagcaaatcgatatcaaaaaagagctgtatcaaattaaagactatattgccattgagcaggcccgctttggcgacaagctgacggttatctatgatattgatgaagaggtgaattgctgcattcccagcctgctgatccagccgttggtggagaatgccattgtccacggtatccagccttgcaaaggtaaaggcgttgtcaccatcagcgttgcagagtgcggcaatcgggtacgcattgcggtgcgggataccgggcacggcatcgatccaaaggtgattgagcgggtcgaagcgaatgaaatgccgggcaataaaattggcctgctgaatgtccatcatcgcgtgaagttattgtatggcgaggggctgcatatccgccgcctggaaccaggaacggaaattgcgttttacattcctaaccaacgcaccccagtcgcctcacaggctacgttattgctttgagccggagtgatattgtgaaagtcatcattgttgaagacgaattcctggcacaacaggaactgagctggctaattaaagagcacagccagatggagattgtcggcacctttgacgacggtctggacgtgttgaagtttttgcagcataaccgcgtcgacgccatttttctggatatcaatattccgtcgctggatggtgtgttgctggcacaaaacatcagccagttcgcccataaaccgtttattgtgttcatcaccgcgtggaaagaacatgcggtagaagcgtttgaactggaggcgtttgactacattctaaaaccgtatcaggagtcacgcattaccgggatgctgcaaaaactggaagcagcctggcaacaacagcagaccagcagcacgcctgccgcgacggtaacgcgtgagaatgacaccattaatctggtgaaagatgagcgaataatcgtcacgccaattaacgatatctattacgccgaagcgcacgagaaaatgacctttgtttatacgcggcgtgaatcctacgtaatgccgatgaacattaccgaattttgcagcaaactgccgccgtcgcattttttccgctgccatcgctcattttgtgtcaatctgaacaaaatccgcgaaatcgaaccgtggtttaataacacctatattctgcggctgaaagatctggattttgaagtgccggtcagccgcagcaaagttaaagaattccgccagttaatgcatctttaatcgggaactttcatnaaagcaccaggcttgcccgccgatcaacaatttttcgccgatctgttcagcggcctggtgcttaacccgcaactactggggcgcgtctggtttgccagccagcctgcctcgttgccggtgggcagtttatgtattgattttccccgtctggatatcgtgctgcgcggcgaatacggcaatctgctggaagcaaagcagcaacgtttggtggaaggagaaatgctgtttattccggngcgcgcggctaatttaccggtcaacaacaaaccggtgatgctgttaagcctggtgttcgctccgacctggcttgggttatcgttttacgatagccgcaccacgtcattgttgcatcctgctcgccagatccagcttcccagcctgcaacgcggtgaaggtgaagcgatgcttaccgccctcacccatcttagccgttcgccgctggagcaaaatatcattcagccgctggtgttaagtttgctgcatctttgccgtaacgtggtgaatatgccgccgggcaattcgcagccgcgcggcgattttctctatcacagcatttgtaactgggttcaggataattatgcccagccgctcacccgcgagagcgtggcgcagttttttaatatcacgcccaatcatctgtcaaaactgtttgctcagcatggaacgatgcgttttatcgagtatgtgcgttgggtgcgaatggcgaaggcgaggatgattttgcagaaatatcatttgtcaattcatgaagtggcacagcgttgcggttttccggatagcgactatttttgtcgcgttttccggcgtcagtttggtctgacgccgggagagtacagcgcccgttttcagggctaacgtcagaaggttaattctgtttccagcagcgtcaggatactttgtgcatcttgcgcggcaaacaacgactggcggaagtttttattcaccagtttacgcgccagctgcgagaagactttcacatgattcatcccttcgttagcacccagcgtcagcatgatcaccagttcgacttcgcccatttctgactgccagtcaaccggtttcgccagccgggcaatgctgatactggaatgacggatccactgagatttggtgtgcgggatcgccacgccaaaaccaacgccagtggtgacaatctcttcccgctgccagacatcctcttccagctcgaacggatgttcagtgcgcccgttaacgccgaggttaccgcacaggaactggatcgcctgctctttattgctaaaggcctgatcaacgaagatattctccagcgccagcagcgggcgaacgtcttcttccggcgtaaaggcggtgagtaacgcttcaatttcctgcgcgctgcgacattcacacgcctgacgtgccagttcccgacacgcctcgctatccagttgacgaagctggcttttcaccgccggaatgcgcgggctactcatactcagctcatccaggcccagcccaagcagtagcggcagataacggctttcaccgcccagttcaccgcaaatgcctacccatttgcnccgctgatgcgcagtggtaactatttgctgcaacatgcgcaggaacgatggcgtaatcgggttatatagcggcgatacgcgcgggttattacgatcgaccgcatacagatactgggtcatatcgttggagccgatactgaagaaatcgacctcatcgcagaagtgatcgatgatgtagcacaccgacggcacttccaccatgatacccagcgtaatcgtctctgcatgacgcaggccatcgcgcttaagctcaacgatcgctttttggatctcgcccttcacccataagatctgatcgaggctgtggaccatcgggatcatcaactgggcgttgccgaaactggcggcgcgcaaaatggcccgcagttgagtgcggaacaggccagcaaattccgggtaaatacgtaccgcgcgatagccgaggaacgggttctcttcctggggaatattcagataaggaatgcttttatcgcctccgatgtccattgtgcggaagataatcggcttgtcgcccgctgccagtagcacctgctggtaggcttcaaattgctcctgctcgtccggctcgctgtcgcgatccatatagagcatttcggtacggaacagcccgacgccttccgcgccgttggcaaacgcgccaggcgcttccagagcggtgccaatattcgccgcgatatcaatacgcttgttatcacgggaataagccagctgcgcggcagcctgcgcctgttgtttttggcgtttatccgccagcgtctgcgcgacctgataataaccgctcaccgcgtcattcgggttaatcgccagcacgccgcactgggcgtcaagcactgcaggttgcccggcataacgcgcgatcgcatccagcggcaggccgctcagtaccgggatcgccgaggcgcgggccagaatcagggtatgcgaggtgcgcccggttttctccagaatcatgcccgcaagattttttaaatccaggcttaaaaactggcttggggttaaatcctcggccaccagaatagtcggtttttccagcaccagattgttgcgcggcttcagttccggccaggtaatatgcagcaactgttcgctaatatcgcgaatgtcgctaacacgttcgcgcagataatcgctggcagaagcagaaagtttggcgcaaacctgctccatatttctgatgatcgccgcccccagcccctgatgctgttctgtcatcaggcgacggatattgcctgcaaattcatcatcctgaatcagcgacaaatgggcgctgaggatagttttgctttcgccgtcacgctcacgcaattgctggttcagttgctcggcaagcgttgccaggctgtgctccagccgggtggaatcttgcgcactggcggggattgcccgataactgtcgaggctgtcgctttgtaacagggtcagcgtacccacgccgacgccgcttgccagcacattgccgtacagtaaatccgggttaaggcggcttaatgaacgcggcagcggatgcgccgtcagttctgcctgcgtaggctgaacgctgtcgctgtcgataaagcgcacctggatgtactcttccagcacgcgccgcgcctgctcttcatcgctgccgctaatgttcaggctgcaactgtcattaaatagggtgccggtgccaatcagcgccagcgagcttttggcatcggcctttgcgttctggcgatggttaataaaagtgatttcgctttgccactggctgcactgttctttaagttcccacgccggacgagcatgtagaccgttaggcaaaggacagagaaattgaatcgttaacataaccgctccgggttaatcaggagatcatctgaaatccgtcagttgaacaaccgtctcacgcgtaagacgttgaataagggcagataaaagttgctccatctgcaaaatgtcacggcaatcggcaatcgacgcggcgcaatgtccgtggcgggtggcaggccccatcaccactgtgggtacgccagtaccggttaagtgcaccgctccaccgtccgtgccgccgttactgaacatatccgcctgtaacggcacgccaatttctgccgccacggtttcgatccaggcggtgagttttggcggcgcaatcagtgacttgtcgcttaacaccagcatcgggccgttaccaatctggcgatggttagccgcgccataattaaagtttttcgcccagcaggcggtatcaaggacaatggcgacgtccggcgacaccgnnnnggtggcagtttgcccgccgcgtaaccccacctcttcgctggaactggccaccagccacacttccgcaggcagttcagcgctgtgtagttcgcgcagtaacgtcaccagcaggtagcaaccgaggcggtcatcaaaggctttccccatcacccgctggtgggggagaacctgaaaagtggtatcgaacgtgacgcgatcgcctggacgaattcccgcctgcatcacttcgtcatacgagcgcgcnnnaatatccacgcgcatggcgctgacatcattcccctgccggtcgccgtcaagcaggcctggaattttgcactcttcacgggtggtgatgcgcaccggctgcagctggcgggcagccatgcgtacattgccaaccggcagcacatcaatcgccccttcgcgggagatgctgcgcaccataaatcccacttcgtccatatgcgcacagatcatcaccttcggacctgtcgattcattgaggcggatcagcaccgatcccagcccatcaaatcgcacttctttttgcaggcgatccgcttcttccagcaggatctgccgcacttcctgttccgaggaggcgatcgcatctgcctcgctcaacgctttcaatagcgataaatccattatgcctctcccgtgagcaacactgttttcggcatggcgtagagcacttctgcgccttgcggggtgaccagcacaacatcctcgatgcgcacgcccccttgccctggcaaataaatccccggctccacggtcagtaacatgcctggctgtagcgtcgtggtgtcccgcggtgaaaaacgcggatcttcatgaacttcaatgccgatagcatgaccggtgttatgaccgaaatagtggctaaaacctgcctcggtaatcacccgacgcgcggcttcgtcaacctgctggcagcgcacgccggggcgaattgcagagattgctgcgagctgtgcctgcaaaacaatctgatagacgttaaacagcgggtgagattcggcgctcaccccttcgccattcaccagcaaggtgcgcgtcatatcagagcagtagccctgatagagcgcaccgaaatcgagagtgacaaactcgcccgctgcaacaatcttgtcgctggctttgccgtgcggcagcgccccacgccagccactggcgacaatggtgtcaaaagaggttttttctgcgccctgctggcgcataaaccactccagttcagcggctatctcgcgctcgctcatccccacctgaataaagcggcgaatatgctctgcaccgcgatcggcaatcccacaggcaaggcggattttctccacctcctctggcgttttgatttgccgcagcacatccggcgtggcgctaaccagtttcgcattgagttcagactgccagcgatgcgcggtttcccaactcacctgctggccttcaaaaccgagcgtttgcaactgctcatcggcaatgatttgcctggcgatggttgtaagcgtgtgcgtcgcgtcaagcaaatgcagctggtaaccttgcgtgcgggcttctacatccgcgtaatagcgcgagtccaccagaatgtgcgcactttcacggctaatcagcacatagcctgatccggtggagatccccagatgcggctgtttgttctgccgtgaggagagaagcaccgcatccagttgttgcgccttaagccagtcgcgcagcgaagcgagtaatgtcatctggattttccttcttacaggctatcgattaacaatttgcctttacggaacatcatcagacgcaggaacaccaccatcagcgcagttatgactgcccccagcgcgatccccgccatatagacgcccaggttagtgaccagcggccatgcccagatagcggattccgggaaccattgcactgcgcccagccagacagcggcggttgagccgacaatcgcgccgaccatatacgacggaatggcggtgatggggctttccagcgcaaacggaatcgcaccctcactgatccccataaaggcaaggaacatcgcggtcttaccctgcggataaagttgtgcgttgaacaggcgtttgccggttaaacgacggtcaataatggtcgccagacccagaccaatcggcggaataacgatagcgatagaacgagcggtgaccggtaatacgtggtcagtggtaaagctgaaggcaacaaaacctgcggctttgttgatcgggccaccaaggtcgattgctgtcgccgcggcgatccccattgcgtacatcagcgcgcccttctcacctgcggcagtcagcacagtacggataccgccgttgatccagcccccaaagggggtgatgacgtagtacatcgccagcatgacaaaaatagcggaaagaatcggtagcaaaaatgtggttttgaacgctaacaggaaatccggtaactggattttctggttcatccatttcacaaggtaaccggcaacgatagaaataatcagcgcaccaatgaaggtggacggcaccggcgaagaggtcgcccattgcatagtgctgggatcgaagttcagcagttgcgtcggctgggtagacatcaagccgccgataaaaccagccggaaacgccagtttgccaccgatagagttcgccacaaaagcagcaaacatcggaatggcaaaaccaaacaacacgccgccgaaggactgcgacaaccaggcaaatttcagtaaggagaggtcgaaaccggagaatttcccgctattaagagcatccatgatgccgatctcagcaggaattttaagccagctataagcaatcaactggctgaaagcgaggatcacaccgcccataatnaaggtcggcaccatgcgtgaaatccctgacatcacatgctgcgggagttcaccccagaagctgcttttagaggcctgcggattcttaactgccgctgccgcaccggatgcgccaggcacaacggttgcactgcgttttttaatggccataacaattatccctgtcgaatattactgttgttcagaggcaatcatctcttcgatttctttgatgatgcccgcagcgtttttaattgcgtcctgcaaagtgatttcataaacgtcgtgtgattcgaaacgttcgttatcttccggggtaactgccacggagtggatgatgatggtcgcttcggcgatatcctgcgccgtcaggcgattctggataccgtccgcgccctgggtttcaattttcacttcataaccggcttctaccgccgcttcttccagcgcctgagcggccataaaagtgtgagccaggcccattgggcaggcacataaggcaatcagtttcttactcatcgttaattcctcgttcagtgatagttgacgagtgaaattatgaacgtgcaaaacaaatcgccgttaccagacaaataatgcatttactggagaattaatcccgctgtacggaagtgtgacgcaggtcggccttgtgaggggacacaaagaaaagttgaattaactgtatgatttaaaanattatcgggagagttacctcccgatataacaggaaggatttacagaatgtgacctaaggtctggcgtaaatgtgcaccggaaccgagaagacccggattgtcatggacgatgagatacaccggaatatcatggacatattctttaaagcgccctttatcttcaaatgcggcacggaaaccagaggctttgaagaactcaaggaagcgcggcacgataccgcccgcaataaacacgccgccaaatgtcccgagattgagcgccagattgccgccaaaacggcccataatgacgcaaaacagcgacaacgcacggcggcaatcggtgcagctgtcagccagcgcgcgttcggtaatatcttttggcttgagattttctggcaggcggttgtcggctttaacaattgcgcgatacaaattcaccagtcctgggccagaaagcacgcgttccgccgaaacatgaccaatttccgcacgcaatatttcgaggataatggcctcttcttcactattcggcgcaaaatcaacgtgaccgccttcgcccggcaagcttacccaacgcttatcgacatggaccagatgcgcaaccccaagccccgttccggcaccgtaaaccgcaataggcttaccttctaccggttctgcgccaccaaactgaatcagatgctcttttttcagcatcgggatcgccatcgatacagcggtaaaatcgttaataatttccagatggctaaaaccgagattctttttcatttcggcaattgagaacgcccaggtatggttggtcattgccacccagtctccggtaatcgggcaagcgatggcaatacagccgtctttcacctcgaccttatgttcttcaagataaacgcgaatgaccgcttcgaggctggggtaatcaagccctgaataggtcttagcctgcgagatttcaccactggcaatatcacacagagcaagacgtgcgttggtgccgcccacatcaccgactaatgcatactttgtcattcttcaactgctccgctaaagtcaaaataattctttctcacactgtaaatacctgggggcataacaacaacgccggaaaggcaggctccctgtaaatatcgatctgggtcacacaattactttatcgtttcagcaccaattgcagcgatgcctttttgcaagctgggcaaactaagtatctgaccccgcataaggaatagaacatgctccatccgcgagccagaaccatgttgttattatcgctccccgccgtggcaattgggattgcgtccagtcttattctgattgtggtgatgaaaatcgcctcggtattacagaatttgctctggcaacgactgccgggaactctggggatagcccaggattcacccctctggatcatcggtgtattaacgctaacgggtattgcggtggggttggttatccgtttcagccagggtcatgccggaccagaccccgcctgtgaaccgctgatcggcgcaccggttccgccctctgcgctaccaggacttatcgtagcattaattctcggtcttgctggcggcgtcagcctggggccggaacatccgatcatgaccgtcaatatcgcccttgcggttgccattggcgctcgtctgttaccgcgcgtcaaccgaatggagtggactattttagcctctgccggaaccatcggcgcgctgtttggtacacctgttgcggcggcgttgatattttcgcaaaccttaaatggcagtagtgaagttccgctatgggatcgtctttttgcgccgttaatggcggcagcagctggtgcacttactaccggattatttttccatccccatttttcactgcccattgcgcattacggacagatggaaatgaccgatattctcagcggtgcaattgtcgcggcgattgccatcgcagcagggatggtcgccgtatggtgcttaccacggttgcacgcgatgatgcatcaaatgaaaaatccggtgctcgtgctgggtattggcggatttattctcggtattctgggggttattggtggaccagtttcgctgtttaaagggctggatgagatgcagcagatggtggcaaatcaggctttcagcaccagcgattactttttgctggcggtaattaaacttgccgccctggtcgttgctgccgccagtggctttcgcggtgggcgaatcttcccggcagtgtttgtcggcgtggcattagggttgatgctgcatgagcacgttcccgccgtaccagcggcaataaccgtttcctgcgctattctcggcatcgtgctggtggtaacacgcgatggctggttaagtctttttatggcggcagtcgttgtacccaataccacattgctaccgctgctctgtatcgtcatgcttccggcatggctgttattagcaggtaagccgatgatgatggtcaatcgtccgaagcaacagccaccccacgataacgtttagcaaaaaatgctctcctttatgatttaagagttatggcgatgatacggggctttacctccccgtaatattgcgttaacaggccgctgacggcttcgatcgtgaaggagaataacaatgttcaggtcactgtttctggcggccgccctgatggcatttaccccgcttgcagcaaacgcaggcgaaatcaccctactgccatcaatcaaattacaaattggcgatcgcgatcattacggtaattactgggacggtggtcactggcgcgaccgtgactactggcatcgcaattatgaatggcgtaaaaaccgctggtggcgtcatgataatggctaccatcgtggctgggataagcgtaaagcatatgagcgtggctatcgtgaaggctggcgcgatcgtgacgatcatcgcggaaaaggccgcggacatggacaccgccattaaacacattcgccaatggagcacaaggcctgatgcgacgctagtgcgtcttatcaggcctacaaaccggctctttaacgcgtagggcggataaggcgtttacgccgcatcgccaatagtgccagatgcgacgctcattcaactacaatcccagcgccgtccccaccaataaccagatattcagcgccacgaccagcactacaatcacccagcctgtctgttttacncntttgctgttcaccagatcgcccatcaacttgctgtcactggtgaaaatcagcagtggaaccagcgccagggcgataccaaaacttaacagcacctgactcataaccagaatccgtgtcggatctaatcccatcagaatgacaataaatgacggcagcatggtgactgtacgacgcacccacagcgggatatggaagcgaatgaacccctgcatcaccacctgccctgccagtgtccccaccaccgttgaggacagtccggcagcaaccagacttaacccaaagaccgttgccgcagcatggcttaacagcggttgcagcgtcaaataagcctcatcaagatcggcaacaccagtatgaccagaaaagtggaacgccgccgcagctgtagccatcatcgccagattgacaaaaccggcaatagtcatggcgatagccacatcccatttggtggcggaataacgttgttgacgcgaaccgccatgtaaatgctgagtgagcgaagagtgcaaataaatcacatgcggcataatcgtcgcccctaacacgcctgctgccaggaagaccgcctccgaagtaggtaaactcgggatcaccattcctttacccagctgcgccaggttaggctgggagaaaatcaactcgacaatgtaagccgcggcaacaaacaacagtaacccgccaatcactttctccagcggtttttgcccgcgacgttgcagcattaaaatcaggaaagtcgcgatccccgtcagcaccgcgccctgcaacaacgaaacaccaagaatgagtttaaaaccgatcgccgcaccaataaattccgccaggtcggttgccatcgcaataatttctgcctgaacccaatagaaccacactacgggacgcggatagtgatcgcgaatctgctccgccagatttttaccggtggcaatccctagtttggcagagaggatctgaatcagcatcgccatcaggttggcccaaacgacaacccacagtagctgatagccgaagctggcacccgcctgaatattggtcgcaaagttaccgggatcgatataaccaatcgccgcaatgaacgcaggtcccattaatgcgagcctcatcttgcgcgccgcccgtccgctgctactctcaacgcgatagttcgtcatcttgtgcctctaaaacatagcctttgctatgtttcatgctatgccaaacgagaatgattatcaaattcatttaaatgggttgtggtgatttctctgatagaccaggattatgactacgaaaagattgatgacttgaatgttatggttatgtttaatgttagcacatttacataactttcagcttccatacacaacatagcagaaatgtatgacagctcactatttttgaagcttgtcacaggacgtcattatagtgtgtgtcagatctcgttttccttaaccatgttacatagaatgtgcacggaaatttaacctgcctcatatttggagcaaatatggaccgcgtccttcattttgtactggcacttgccgttgttgcgattctcgcactgctggtaagcagcgaccgcaaaaaaattcgtatccgttatgttattcaactgcttgttatcgaagtgttactggcgtggttcttcctgaactccgacgttggtttaggcttcgtgaaaggcttctccgaaatgttcgaaaaactgctcggatttgccaacgaagggactaacttcgtctttggtagcatgaatgatcaaggcctggcattcttcttcctgaaagtgctgtgcccaatcgtctttatctctgcactgatcggtattctccagcacattcgcgtgttgccggtgattatccgcgcaattggtttcctgctctccaaagtcaacggcatgggcaaactggaatcctttaacgccgtcagctccctgattctgggtcagtctgaaaactttattgcctataaagatatccttggcaaaatctcccgtaaccgtatgtacaccatggcagcaacggcgatgtccaccgtttctatgtccatcgttggtgcatacatgaccatgctggaaccaaaatacgtcgttgcagcgctggtactgaacatgttcagcacctttatcgtgctgtcgctgatcaacccttaccgtgttgatgccagtgaagaaaacattcagatgtccaacctgcacgaaggtcagagcttcttcgaaatgctgggtgaatacattctggcaggtttcaaagttgccattatcgttgccgcaatgctgattggctttatcgccctgatcgccgcgctgaacgcactgtttgctaccgtgactggctggattggctacagcatctccttccagggcatcctgggctacatcttctatccgattgcatgggtgatgggtgttccttccagtgaagcactgcaagtgggcagtatcatggcgaccaaactggtttccaacgagttcgttgcgatgatggatcttcagaaaattgcctctacactctctccgcgtgctgaaggcatcatctctgtgttcctggtttccttcgctaacttctcttcaatcgggattatcgcaggtgcagttaaaggcctgaatgaagagcaaggtaacgtggtttctcgcttcggtctgaagctggtttacggctctaccctggtgagtgtgctgtntgcgtcaatcgcagcactggtgctgtaagaccatacataaaaaagccggggataattccccggcttttttacgcctgttaatcagctaatggctgcgggcgaccaatcaaatacccttgcagatattgcaccccgagcttatgcaatagcgcctgttgctgttgcgtctcgacaaactccgcgaccacactcaatgacttcgctttcgccagatcggtaattgatctcacaatcatcgcatccagcgtattcgtgacaatatctttcacaaagacgccatcaattttgatgatatcagcctgcaaacgctttaaccgttcgtagttggcatagccggtgccaaagtcatcaatcgcaatccggaaaccaaacttatgcagctgctcgatgttgtacatgctgctttctgcgttagaaaacgcctgctcctcggtgatctcaagaatgaccgcctgcggggagatgtgataacgcttaaatagacgaataatccgcccggcaatattcttttgcagcagcgtgagcggcattaaattaactgaaaagcgcgggccttttttgtcgcaagggtgtgttgccagccacttcaacaaggattccagcacttgcaaatcaaaacgcgcgctaaggttaaactgagcaataaggggcagaaacttatccggggtcataatgccgccgtcatatttcagtcgcncgaggacctcatcataaccttcaccctctttgttgcgaattggctgggcgtagagcagcaaatcaccctgatctaacgccgtgcgaatggtattcagcaatagcacctgtttagtggtctgcccggaaaccatctcctctcggctatccagcgccagcacatgatgatgtgcgcaggattgctccgccagccagcttaactgccccaacaagggttgcagggtttcctgatttccatcaaaacgcccccaggcagcaccatagcccatatccagcccggtattgttccagtgaatttgccgactattcaggatgttaaccatatgctggagtcgcccttccgtttcaggcccgctcagcactaacagcagttcactacccggcaattgatacaacttttcgttttcctgcatcaatggcagcagcgtacggtaaattgatcggatacagtgaacacgcatcatcaacccgtaatgacgactcataaactcaagattatcaatgcgcaggcagcaaaaactcttgcccgcctcttgctccggcgcttgttccaacgcacgaaagttgggcaggagcgttaacggatcggtcagcgcctgcaaatgccagcggcgattaagccattcactgcgatgataaatgcgcaccatatagagcaggcaaacgctaaaggaaatcagcaccgcgagaataaatgccagcgaatattcggtttcccccccttgcaaaaagttctggttgtaattcagcaggcaaagcgttgaaacagcccaagtgagatttaaaaacggatagcgaagcttaccgaccccgagggtaaagatgatgaagaaaacgggtaccaggtaaccggcaataaagtcgttttcataaggtgtgcacaacagaagtagcagcacgcttaacgctgccagccagcttaaggtaaatgcgcgtttctctttgcccaacgacggagcgatatccctgcgccacaatatctgcgcaaagtggggacttacaatcatgcgagtgagatagtagaaaagcatgttgtaaatcagcacagcggtgaaaaggcttagcaaatcaacgaccgtgaaaatggcatccgcatcgccgaaaaaggtggatatctttagcgggaaatcaaagaagctccccacaagatacatgctgcatttgatgccgatcggcgtcaccaaaccaagccagaacagacgttgccagacatatcggctggtcaatccataacgccaacgcgtccccagctgccagcgtaatattgcgcaggcacacaacacgacaaacgtctggctaccgagcatgaccgcagtctgtaaaaaagagagatgaaagttccacagattggtgcaaaacatcccgcataaaacgggaacgacaccgcgccagccaaagataaacaagattgacagcattacgcacagtggcatccacgccagaaagatataactggaatggataatggcaagtggcgaaataaaacgggatagctgaataagtaccacggtgagcgtaaacgctagtgtgaatatcttgatattttttatcaggttatgctccacaaacatgagtacactactctcactgatcggggttttcaggcacacaaataataagtttattcgcattgcgaagcaaacaggggccatcctgttgccgatttttcatccaatgatgctttcaccaggcggcactaacccggacgtagactgtattacaaaagcggcaaaaagcagagacaaaaaacccccgctttgcagcgagggttggaaatttggtggagctaagcgggatcgaaccgctgacctcttgcatgccatgcaagcgctctcccagctgagctatagccccgtcacgtaaagcttgtcgagttgacgggcggcatcatatgaattccgcccgaatgtgtcaacggcaaattgcaacgtgtagtttcaatcgctgaaaaatcaggcaaatgaacaattttggaaaaccgctcgcattcagtagttattcatgtcacggtttcctgtaaagtggtgctataaaatgaactactaatagacccacatacattcagggaattgttatgttcaaggagaggatgacaccagatgaacttgccagactgaccggctatagccgc

SEQ ID NO: 1355 - DNA, 4305 bp, Escherichia coli
  Strain O55:H7
  modified_base (819)..(819): a, c, g or t
  modified_base (973)..(973): a, c, g or t
  modified_base (1650)..(1650): a, c, g or t
  modified_base (3948)..(3948): a, c, g or t
  modified_base (4212)..(4213): a, c, g or t
ttaataaatgggtacgcaaggaaggctggacaacgtcaccaaaacctggcgtccagggtggcaaagcccgactggttcacgtcaatgaacaggttcgtgaatatattcgtaatgctgaacgtccagaaggtcagggagaagcgcctgccctttctggtgatgcgccgcttgaagtattgctggtgacactggcgaaagagatgacgccagttgaacaaaaacagtttacatccttgcttctgcgggaagggattatcggattgttacaacgcttagggattcgcgatagcaaataatatgaaaagattacgcaataaaatgaccaccgaagaactggctgaatgcctcggtgtggctaaacaaactgttaaccgttggatcagagaaaaaggctggaaaacggaaaaatttcccggcgtgaaaggcggtcgtgccagacttattctggtcgatacgcaagtttgcgagtttattctgaacacgccagccttccataacacaccgatgcttctggaagccgaagaaccccttgccgaatacgcaccggggattcgcactcctgcttatcggcaaatcatcagtgcaatagacaacatgactcacagtgagcaggaaaaagttgcgcaatttttgtcacgcgaaggaattcgtaatttccttgctcgtctcgacatagatgaatcagcttgacatcctccacgccctgaatgacgaggatccctgctacgttcaggctgtcgcctgaatcatttcggtgggttcctgcttcaacgagcggcctgactgcaccatctctccacaggcaagaacggcgtgccncgccgctaaaatgttacgagcgccgtttacatcggcgttcgctgtatatccacatacctggcatctgaatttactttgtgacaggcggttttctttcgctgtatgaccacagcacgcgcaacgctggcttgtgtacgctggcggaacagccagnacctgaccgccacgccagagctgcttgtactcaagctggcggcgcatttcataccagccctgatccagtatcgaacggtttaaacctgattttgcccggacattgcgccccggctggctgaccgtacccgctgctgactttgacatgttgctgaccttcaaatcctcaatgactatcattgcgtggtttttgctgacggtcgttgtgactttgtgaaggtagtccctgcggatatttgcggtacaggaatgcagtcgctgtattttgcgtttctgcttctgccagttattgctgaatttgaccttgcggcttaactgtcgctgaagtctcgccaacttcttctggtttttctgaaaactgtttacaggctcaaagactgtgccatctgacagcgtggcgagtttagccacgccagcatccagtccgaccattgatgctgaagggtgaaccggagttgatacttcactttctgtctgaatactgatgtaccacttaccgcaggactggctgacagtgacatttttcacaacacccgtgacctgacggctattccggtagcgcatccagccaagtttcggcagaaaaatacggctgttttcctgatcgagcttaacgccctgcgggtagcggaatgcatcattctgtccccgctttttgaatcggggaaaagcagcccncttccggaagaagtttttgtaagcccgctcaaggtctttcagtgactgttgcaatggctgtgacggggcatctttaagccattgcgtttcagtggcatttttccactcaaccagccaggaagccattttcccgtaagggatgtatttattaccggcctcatgattctcattctgaagcgccagagcacgattgaaaacgaaacgacatgcgcctgcgaagcgcctcatttcacgctcctgttgaccaccgggtcttaactggaatttaaatgcctgtagtcgtttcacaggccaaatgatactttggtctgtgaaaaaagaaaccgatatccggcgtggaaggcattgtgttttcctgatgcatgttcatctgttctttgtcaccagataccgacgtcagatttttgactatgacgcgacagaaaaactacgcacttacttttcaaatgtatgtgctgattttgaagctgaactggttgaaatggatggcgaaccagatcacgtccatttgttaactaactatcctcccaaactggcgatatccagtctggtaaacagcctcaaaggcgtatcgggtaggttactgcgacgagatcgaccagatattgcagtcaggtattactacaaaggcgttttgtggagtcctggctattttgccagtagctgcggaggtgcgccaatatccgtcatccgccaatacattgaacaacagcaaacacctggtcaggtggaaaaccgcgccttatatccccgccctgaaggacggggttttacggcgcaccggataaataaaaaacggcaggggtatctctcctgccgtttatcttttatgcgctaattactgctgattttcgcgttccgcaataaaagccagcgctttgttgatacgctcgatactgcgggtcttaccgatcgcgtgaacggtaacgtccagcgccggagactgccccgcaccggttacggcgacacgcagcggcataccaactttacccatacccacttccagctcatccgccgtcgcctgaatagcgtgatgaacgttttcagctgtccagtcagtaatcgcggccagtttgtcacgaaccacttccagcggctgacgcgctaccggacgcagatgttttttcgcggcgtcggcatcgaactcagcaaaatcttcgtagaaataacggcagctctgtgccatctctttcagcgtcttgcagcgttcgcccagcagtttcaccagatcagccagctgcgggccgttacgggtatcgatattttcctgctcaatgtgccactgtaagtgagtagcaacatactccggcggcagcgcgttaatgtagtgatggttcagccacagcagcttgtcggtgttgaacgcactggcagatttgctgacggcattcaaagtgaagtatttgatcatctcttcacgagtgaagatttcctgatcgccgtgggaccagcccagacgcaccagatagttcagcagtgcttctggcaaataaccgtcatcacgatactgcattacgctgactgccccgtgacgtttggacagttttttgccgtcatcgccgttgatcatagaaacgtgcgcgtaaaccggtaccggcgctttcagggctttaagaatgttgatctggcgtggcgtgttgttgatatggtcttcgccacggataacgtgggtgatttccatatcccagtcatcgacaaccacacagaagttataggttggggaaccatcggtacggcggataataagatcgtccagttcctggttgctgaactcgatcggaccacggatctgatcgtcaaaaacaacagaaccttcctgcgggttagcaaaacgtacgacacacggctcatcatcagcgtgatgctcatgactgtggcggcagcgaccgtcataacgcggcttctcacctttcgccatttgctcttcgcgcagcgcttccaggcgctctttagagcaatagcatttataagctgtgccctcttccagcatctgatcgatcaccgcgttgtagcgatcaaaacgtttggtctggaagtacggaccttcatcccactccaggctcagccagttcatgccatccataatggcttcgatagcttccggcgtggaacgctcaagatcggtgtcttcaatacgcagcacgaactcaccgccgtgattacgtgcaaaaagccaggagtaaagagcagtacgcgcgccgccaacgtgcagatagcctgttgggcttggcgcgaagcgagttttgattttcatgaaatggccttacgtttagaaagatgccgacaaccggcaaatcntggaaaaattgagtgggcgatattctatcactcccgcctgattcctcaatgtagttcgggttgcaaccttacgcattattgttttcgttgacaaattgcgcaacacggtctgttttgcgatcatcttgcttaaatttacgacgaacgaacaatttctttagaaaatgcgttgactcattttgaactctccctataatgcgactccacacagcgggggtgattagctcagctgggagagcacctcccttacaaggagggggtcgnnggttcgatcccgtcatcacccaccaactactttatgtagtctccgccgtgtagcaagaaattgagaagtgggtgattagctcagctgggaga

SEQ ID NO: 1356 - DNA, 11216 bp, Escherichia coli
  Strain O55:H7
  modified_base (121)..(122): a, c, g or t
  modified_base (3169)..(3169): a, c, g or t
  modified_base (4003)..(4003): a, c, g or t
  modified_base (4102)..(4102): a, c, g or t
  modified_base (4104)..(4104): a, c, g or t
  modified_base (4106)..(4106): a, c, g or t
  modified_base (4108)..(4108): a, c, g or t
  modified_base (5137)..(5137): a, c, g or t
  modified_base (5221)..(5221): a, c, g or t
  modified_base (5322)..(5322): a, c, g or t
  modified_base (5743)..(5743): a, c, g or t
  modified_base (6160)..(6160): a, c, g or t
  modified_base (9057)..(9057): a, c, g or t
  modified_base (9231)..(9231): a, c, g or t
  modified_base (11106)..(11106): a, c, g or t
  modified_base (11109)..(11110): a, c, g or t
atcccgtcatcacccaccactttctcaccagctaaatttcttgtaaaaatgtgaagtaccgaagtgggtgattagctcagctgggagagcacctcccttacaaggagggggtcggcggttnnatcccgtcatcacccaccacttcgggtcgttagctcagttggtagagcagttgacttttaatcaattggtcgcaggttcgaatcctgcacgacccaccaatgtaaaaaagcgccctaaaggcgcttttttgctatctgcgatttgtaagattgatttttcttctcaagttccttgttcttctgccgatattacctcgtacagtgacgaggactgaacaatggccactatctcttcaacttcaattccttccatacaaacacagagtagtaacagggcatcacaaggtagcgatgttgcttcacaaatcgcgcggataagtcagcaaatcatcaaactcactcaacacattaaagagattgtagacactagcggcagtgctgaagacaagcaaaaacaggccgaattgattcaacagcaaatcaccctactggaaacacaactggcgcagttgcagagacagcaggcagaaaaggcgcaggagaaagagcagcgtttgtctctgaatgtatcccttctaaatcctgttgaaaatacgactcatatcggtatctatatctgatacaacggatccccttcccgcccagccattagcgtattgccctggtctcgtaccacgtcccataacgcttcagcggcggtggaaagtgaacggtttttcctgcgcaccagcatcaactggcgttccaccaccggcgtaatgcgctttaccaccagcgggctaccttcaggcaatggtagcgccagtgcgggaagaatactgatgccgatgcctgcggctaccatcgggaacagcgtcgccggatgtccaatctcctgcacaatattcgcctgaataccattgcgcgccagcgctgcgtcaatcagcggtcggctgcctgacgcataatcctgcaacaccaatttcgctccctgtaatgcctgccagggtacataatcttccgcggccaaagcgctatcccgatggcaaagcagaaagaaaggctcggaaagaatcacttcacattgcagatcgcccactgggcctggatcgatgacgatgccaaagtcgacatctccctggcgaatactttccatcacccactgctgcggacgatcgtgcaggacaaactgaatatctggatagcggcgatggctttcagcaatgcattgcggaataagatgcgcggaaatggtctggctggcagcgacccgaacttttccgctcagttgttgccccatacgcccggtatcgcgcaacgtgctgttaagttcatccagcagtcgctcaagacgcaaagccaactgctgccctgcatctgtaagcaccacttcacgcgtggttctgtccagcaggcgaacaccagtatgattttccagctccttcacactgtgacttactgccgactggctcaggccgatacgctctcctgcacgactaaaacttttctcctgcgctactgtgacgaaaacctttaattgttttaaagaataattcatctgttttcttcatgaatggatgcaataaatcaattttatttctcaaactggaagaagcacaatagaaccatcgatcatctggagtctttatgaaactttttcgtatcctcgatcctttcaccttaaccctgatcacggtggtgttgctggcctctttctttcctgccagaggcgatttcgtccccttctttgaaaatctgaccaccgcagctattgccctgctgttctttatgcacggcgcgaagttgtcgcgtgaggcgattattgctggcggtggtcactggcgactgcatttgtgggtaatgtgcagcaccttcgtgctgtttccgattctgggtgtactgtttgcctggtggaaaccggtaaatgtcgacccgatgctctactccggttttctctacttgtgcattctcccggctaccgtgcagtctgcaatcgccttcacgtcaatggcgggcggtaacgtcgcggcggcggtttgttctgcgtcagcatccagtctgctggggattttcctttcaccattgctggttggtctggtgatgaatgttcacggtgcagggggcagccttgagcaggtcggtaaaattatgctgcaactgctgctgccgtttgtgttggggcatctttcccggccgtggattggtgactgggtgtcgcgcaataaaaaatggattgcgaaaactgaccagacgtccattctgttggtggtttatacagcgttcagcgaagccgtcgttaatggtatctggcataaagttggctggggatcattgctgtttatcgtggtggtcagctgcgttcttctggctatcgtgattgtagttaacgtctttatggcacgccgactgggcttcaataaggcagatgaaattactatcgtcttttgtggttcgaaaaagagtctggcaaatggcatcccgatggcaaacattctgttccccacatcggtgatcggtatgatggtgctgcccctgatgattttccatcagatccaattgatggtctgtgcggtgctggcgcgtcgatacaaacgccagaccgaacagttacaggcgcagcaggaaagcagcgccgataaagcttaaagcggacgcttcaggggctggaccagttgcgtcagcccctcggttttaatcagcagcgtgatttgcattagctcaccgagcttccctgccgggaactcatctttgcgggcaaaccacagcagatactcctccggcaggtcgattaagcgacgccctttgtatttgccaaacggcattatcgtattggctatttcaatcagctgctctttttccatctcagctacccagcaaacgcagcatttccgcttcgtcgatgacttcaatgcccagttcctgcgccttcgccagtttagatcctgcagcttcacccgctatcaccagatcggttttcttcgacacgctgcccgcgactttcgcgcccagttcgaccagtcgagctttagcgtcatcacgcgacatctggcttaagctgcccgtaagcaccacggttttaccagcaaacgggctgtcaatctcttccgcgttgataacgatcggcgcangccagtgaacaccttccgccaacagctcgctgatgacattgcggttgctttcttcggcaaagaagttgtgaacgtgggatgcaacgacaatgccaacatcaggcaccttttgcagctcttcaatcgaagcggcttccagcgcttccagcgttccgaaatatgccgccagacctgctgcggtggcctcgccgacttcacggatgccaagtgcatagaggaagcgagcaaaggtggtttctttcgctttttccagcgcgttaaccacgttttgtgccgattttggccccatacgctccagtccggtcagtttgcctgcggtgagtttgaacagatccgccggagtgtggacatattctttttcaaccagctgatcgatgattttgtcgcccattccgtcaacatccatcgcacggcgggaaacaaagtgtttcagcgactctttacgctgcgcaccgcaaatcagaccaccggtacagcgggcaaccgcttcaccttccacacgctcaacgtcagaaccacataccggacaatacgtcgggaatacaacctcacgggtatcttccgggcgttcagaaagcacgacgttaaccacctgcgggatcacgtcgccagcgcggcgaatcaccactttatcgccaatgcgtaaaccaagacgttcgatttcatccgcattgtgtaaggttgcgttactcaccagcacgcctgcaacatggacaggttccagacgcgcaacaggcgtaatcgcgccagtacgcccaacctgaaactcgacgtcacgcacaaaggtcatctgttcctgcgccgggaatttaaacgctaccgcccagcgcgggnctcgcgcgacaaagccaagctgctcctgctgttccagtgagttgaccttaatcaccacgccgtcgatatcaaagcccagcgtcgggcggtcttcttccncntngngatagaacgccagcacttcttccgccgattcacaaagcgttacccgatcgctgaccggcaacccccactttttaaattgcagtaaacggccaagatgagtatccggcagctcgccaccttccagaacaccaacgccatagcagaaaaaagtgagcggtcgcttcgctgtaatacgcggatcaagctgacgcagtgaaccagctgccgcattacgtgggttagcaaacactttcccgcccgtgcgtcgcgcatcttcgttaatcttttcgaaccccgcctgcggcaggaacacttcaccacgcacttccagacgcgccgggatattctctccgtgcaacttcagtggaatggcgcgaatagtacgcacattagacgtgatatcttccccggtggtgccatcgccacgagtcgcggcactgactaaaacgccattttcatacagaatactgacggcaaggccatccagcttcagctcacagcaccaggtgactttctcgttgcttttcagacggtcctgcacacgtttgttgaaggcaagaaagctttcttcatcaaaaacgttatccagcgacagcattggcacttcatggcgaatctggctgaaagccgccagcggcgcagcacctacacgttgggtaggcgaatcaggcgtaatcagttctggatgtttggtttccagctcgcgcagttcgcgcatcagcctgtcgtattcagcgtcgggaatttccggcgcatccatcacatgataaagatattcatgatggcgaagcgtcgttcgcagttctgtcagttgttgttcgattgattccatatcgcaccatcaatgctaaaaacccccgacaagcgggggttcgaagaggagttaatttgccttaagtgtatcaggcgttggcgtctttaacttcgcggatgatgtcctggtactcgcgcaatttctgcggagtcatcatacggcgctgatcgtcaagcacgacaccgcccacttcatcggcaatatgctgcgcagattgcagcatcagcttgaagttntgcagctcgtcaccgtaagacggtacctgcataaagatagtgacacccggagtagtgaaatccttcatttcaggatcaaaggtncccggtttcaccatattcgccaggctaaataacgccgggccgctgccatccgggctaagatgacgatggtaaatattcatatcgccaaaaatgaagcccgnttgttgaatgctgttaagaagcagttcaccgtttagctcgctaccgtgatgcgccgcgacgttcatgataatcaccgcttctttgcgcttcggtttatccataactggagccggttccgctacaggctcaggctgtggtgccgctacgggttctgcaggctggaaagcctgttgtgccggttgcggtgctgaatgcactggctgcggcgctggcgcgacctgtggcgaaactggctgctgcaacggctgttcaggctgcggctgataggcaggctgctgcaccggctgcgctggacgcggagcatgttgcggcggtacctgcgcttcaggcggctgctggaccggttgacgcggctgcgcagacgcataaggcggttggtactggtgttgcggcgacggacgagcagcctcatgctcctgngcgttagccggggcatgattcacgcggtgaacacgaacctcaccaacgccctcatcatcttcgacatcctcgtcataagaatcgtcgtcacgttttgacttcattcgttttaatggccgatcgcggaacatagaagatcgttctttacggctggtccagaaaccatgtaccagtaaagcgattatggcgatcgcgccaacaatgattaatatcagacgcaaatcctgcatcattatattctctgttgttctaacaccttgccaccacggcaaacatttactcactaagagtatttgccgattacctcaagtgcaagtgcactattaactttcacagcacaaagatagatgaaatcgtgctttttgctgttttttcgaacatatcctaactgtccattgcgcaattacccggtaaaanacgcacaattttcctgggattggtcaaaaggagctcatcctgattatggtttcatcattcacatctgccccacgcagcggtttttactattttgcgcaaggctggaagctcgtctcgcaacctgggattcggcgtttcgttattttaccgctgctggtcaatattttgttgatggggggcgcattctggtggctctttacgcaactcgatgtctggatcccgactctcatgagttatgttccggactggttacaatggctgagctatctgttgtggcctctggctgtcatctctgtgctgttagtgtttggctatttcttctccacgattgctaactggattgccgctccgtttaacggtttattggctgaacaactggaagcacgattgactggcgctacaccgccagataccgggattttcggtatcatgaaagatgtgccgcgaatcatgaaacgcgaatggcaaaaatttgcctggtatctgccacgcgcaattgtattgctaattctttacttcatccctggtattgggcaaaccgtcgcgccggtactgtggttcctgtttagcgcctggatgttagccatccagtattgcgattaccccttcgataaccacaaagtgccgtttaaagagatgcgcaccgccctgcgcacacgcaaaatcaccaatatgcagtttggtgctttaaccagtctgtttacgatgatcccgctgcttaatctgttcattatgcccgttgccgtttgtggcgcgacggcgatgtgggtcgattgctatcgcgataaacacgcgatgtggcggtaacaatctaccggttattttgtaaaccgtttgtgtgaaacagggggggcttatgccgccccttattccatcttgcatgtcattatttcccttctgcatatagatatgctaaatccttacttccgcatattctctgagcgggtatgctacctgttgtatcccaatttcatacagttaaggacaggccatgagtaagatttttgaagataactcgctgactatcggtcacacgccgctggttcgcctgaatcgcatcggtaacggacgcattctggcgaaggtggaatctcgtaaccccagcttcagcgttaagtgccgtatcggtgccaacatgatttgggatgccgaaaagcgcggcgtgctgaaaccaggcgttgaactggttgaaccaaccagcggtaataccgggattgcactggcctatgtagctgccgctcgcggttacaaactcaccctgaccatgccagaaaccatgagtattgaacgccgcaagctgctgaaagcgttaggtgcaaacctggtgctgaccgaaggtgctaaaggcatgaaaggcgcaatccaaaaagcagaagaaattgtcgccagcaatccagagaaatacctgctgctgcaacaattcagcaatccggcaaaccctgaaattcacgaaaagaccaccggtccggagatctgggaagataccgacggtcaggttgatgtatttattgctggcgttgggactggcggtacgctgactggcgtcagccgctacattaaaggcaccaaaggtaagaccgatcttatctctgtcgccgttgagccaaccgattctccagttatcgcccaggcgctggcaggtgaagagattaaacctggcccgcataaaattcagggtattggcgctggttttatcccggctaacctcgatctcaagctggtcgataaagtcattggcatcaccaatgaagaagcgatttctaccgcgcgtcgtctgatggaagaagaaggtattcttgcaggtatctcttctggagcagctgttgctgcggcgttgaaactacaagaagatgaaagctttaccaacaagaatattgtggttattctaccgtcatcgggtgagcgttatttaagcaccgcattgtttgccgatctcttcactgagaaagaattgcaacagtaatgccagcttgttaaaaatgcgtaaaaaagcaccttttcaggtgcttttttgtggcctgcttcaaactttcgcccctcctggcattgattcagcctgtcggaactggtatttaaccagactaattattttgatgcgcgaaattaatcgttacaggaaaagccaaagctgaatcgattttatgatttggttcaattcttcctttagcggcataatgtttaatgacgtacgaaacgtcagcggtcaacacccgccagcaatggactgtattgcgctcttcgtgcgtcgcgtctgttaaaaactggcgctaacaatacaggctaaagtcgaaccgccaggctagactttagttccacaacactaaacctataagttggggaaatacaatgttccagcaagaagttaccattaccgctccgaacggtctgcacacccgccctgctgcccagtttgtaaaagaagctaagggcttcacttctgaaattactgtgacttccaacggcaaaagcgccagcgcgaaaagcctgtttaaactgcagactctgggcctgactcaaggtacagttgtgactatctccgcagaaggcgaagacgagcagaaagcggttgaacatctggttaaactgatggcggaactcgagtaatttcccgggttcttttaaaaatcagtcacaagtaaggtagggttatgatttcaggcattttagcatccccgggtatcgctttcggtaaagctctgcttctgaaagaagacgaaattgtcattgaccggaaaaaaatttctgccgaccaggttgatcaggaagttgaacgttttctgagcggtcgtgccaaggcatcagcccagctggaaacgatcaaaacgaaagctggtgaaacgttcggtgaagaaaaagaagccatctttgaagggcatattatgctgctcgaagatgangagctggagcaggaaatcatagccctgattaaagataaacacatgacagctgacgcagctgctcatgaagttatcgaaggtcaggcttctgccctggaagagctggatgatgaatacctgaaagaacgtgcggctgacgtacgtgatatcggtaagcgcctgctgcgcaacatnctgggcctgaagattatcgacctgagcgccattcaggatgaagtcattctggttgccgctgacctgacgccgtccgaaaccgcacagctgaacctgaagaaggtgctgggtttcatcaccgacgcgggtggccgtacttcccacacctctatcatggcgcgttctctggaactgcctgctatcgtgggtaccggtagcgtcacctctcaggtgaaaaatgacgactatctgattctggatgccgtaaataatcaggtttacgtcaatccaaccaacgaagttattgataaaatgcgcgctgttcaggagcaagtggcttctgaaaaagaagagcttgctaaactgaaagatctgccagctattacgctggacggtcaccaggtagaagtatgcgctaacattggtacggttcgtgacgttgaaggtgcagagcgtaacggcgctgaaggcgttggtctgtatcgtactgagttcctgttcatggaccgcgacgcgctgcccactgaagaagaacagtttgctgcttacaaagcagtggctgaagcgtgtggctcgcaggcggttatcgttcgtaccatggacatcggcggcgacaaagagctgccatacatgaacttcccgaaagaagagaacccgttcctcggctggcgcgctatccgtatcgcaatggatcgtaaagagatcctgcgcgatcagctccgcgctatcctgcgtgcctcggctttcggtaaattgcgcattatgttcccgatgatcatctctgttgaagaagtgcgtgcactgcgcaaagagatcgaaatctacaaacaggaactgcgcgacgaaggtaaagcgtttgacgagtcaattgaaatcggcgtaatggtagaaacaccggctgccgcaacaattgcacgtcatttagccaaagaagttgatttctttagtatcggcaccaatgatttaacgcagtacactctggcagttgaccgtggtaatgatatgatttcacacctttaccagccaatgtcaccgtccgtgctgaacttgatcaagcaagttattgatgcttctcatgctgaaggcaaatggactggcatgtgtggtgagcttgctggcgatgaacgtgctacacttctgttgctggggatgggtctggacgaattctctatgagcgccatttctatcccgcgcattaagaagattatccgtaacacgaacttcgaagatgcgaaggtgttagcagagcaggctcttgctcaaccgacaacggacgagttaatgacgctggttaacaagttcattgaagaaaaaacaatctgctaatccacgagatgcggcccaatttactgcttaggagaagatcatgggtttgttcgataaactgaaatctctggtttccgacgacaagaaggataccggaactattgagatcattgctccgctctctggcgagatcgtcaatatcgaagacgtgccggatgtcgtttttgcggaaaaaatcgttggtgatggtattgctatcaaaccaacgggtaacaaaatggtcgcgcctgtagacggcaccattggtaaaatctttgaaaccaaccacgcattctctatcgaatctgatagcggcgttgaactgttcgtccacttcggtatcgacaccgttgaactgaaaggcgaaggcttcaagcgtattgctgaagaaggtcagcgcgtgaaagttggcgatactgtcattgaatttgatctgccgctgctggaagagaaagccaagtctaccctgactccggttgttatctccaacatggacgaaatcaaagaactgatcaaactgtccggtagcgtgactgtgggtgaaaccccggttatccgcatcaagaagtaattcttgctgcagtgaaaaanggnncccatcggcgccatttttttatgcttccgccagcggcggcaaaatcaattcatcgctctcatgctgctgggtgtagcgcatcacttccagtacgcgcaaccccgcg

SEQ ID NO: 1357 - DNA, 9766 bp, Escherichia coli
  Strain O55:H7
  modified_base (423)..(423): a, c, g or t
  modified_base (1587)..(1587): a, c, g or t
  modified_base (3755)..(3755): a, c, g or t
  modified_base (4358)..(4358): a, c, g or t
  modified_base (5149)..(5149): a, c, g or t
  modified_base (8525)..(8525): a, c, g or t
caccgcatcgtttaatgccttccctttcagcaaaccactgataagctgagcacaaaacaggtcgccagtccctttcaggtcggtttttacccttgaatgggaaatgacattcacgctgtcggcagtgaccaccacaaccagcatctcctgattttcttcattaccggaggcgctggtaatcaccacccattttagtgtgtctgaaagcagactttttgcggcagcaatggcactgtcgagatcgcggcaatttttaccggtcaggatttccaactcaaagatattgggggtaattccctgcgccagcggcagtaaatattgtcgatacgcttcgggaaggtcaggtttgacataaattccgctgtcaatatcgccaatcaccggatcgaccatgatcaataggtcaggatggtctttgcgtancgcagtcagccactcggcaaggattttgatttgcgatgccgttcccatatagcccgtggttacagcacgaagttggcgcagcgcatcacgctcctgaagtgcacgcaaatagccgctaaaccattcatccggaatcgcaccaccgtagaaagtgtcataatgcggcgtattgctcagcaataccgtcggcacggcaaagacattcaggccgttctgtttgatagcaggcacggcaatgctgttgcccacgctgccgtaaaccacctgcgactgcacggcgacgatatccgcctgcagcgccctgctcttatcgttaaacaacaacaaactactcatttaattttttctccttgccgatgatcctcatcgtattccaaccgaaactttacctgattctggcagtcaaatcggctattacaaaacaaggataaggtaattcagtgaagaaaatcatttgtctggtcattacactactaatgacactccccgcttacgcgaagttaactgcccatgaagaagcccgcatcaacgccatgctggagggattagcacagaaaaaggatttgatatttgtgcgcaacggtgatgaacatacctgcgatgaagcggtttctcatctgcgtctgaagctgggcaatacccgtaaccgcattgacactgccgagcagtttattgataaggttgcttcgtcgtcatcgattaccgggaagccgtatattgtgaagatccccggtaagagcgatgagaatgcacagcctttttacatgcgttaattgcgcagacggataaaacggtgcctgcgcaataatcttaaatccccgccccctgactaaaatgctcttccccaaacaccccggtggaaaggtagcgatcgccacgatcgcagatgatcgctaccaccaccgcaccagggttagcttttgccacccgcagtgctccggcaaccgcgccgccggagctgacgccacagaatattccttcccgcaccgccagttcgcgcatggtgttttccgcatcgcgctgatgaatatccagcacctcatctaccagagaagcgttgaaaatccccggcagatattccgcaggccagcggcgaatgccgggaatgctactgccctcttccggctgcaggccaacaatggtcaccggtttggattgttcgcncataaagcgtgaaacgccggtgatagtgccggttgttcccatgctggagacaaaatgggtaatgcgcccgccagtctgctgccagatttccggcccggtagtggtgtaatgggcgtaagggttatcgggattattgaactgatcgagcagctttccttcaccacgatccgccatctccagcgccagatcgcgcgcaccttccatgccctgctctttggtgaccagaatcagttccgcaccataagcacgcatcgccgcacggcgttcctggctcatgttgtcgggcatcagcaatttcatgcgatagcctttaagcgcggcaatcattgccagcgcaatgccggtgttaccactggtggcttcgattaacacatcacccggtttaatttccccgcgcttttccgcctcgacgatcatcgaaagcgccgcacgatcttttaccgaacctgccgggttattgccttccagttttaaccacacttcactgccgttattcggccccattcgctgcaacttcaccagaggcgtattgcctattgtttgttctaatgtactcacgatctctatccatacatggtgttgcctgatgcgacgcttgcgcgtcttatcaggcctacaggttacaaaccttgccattaaaaagcccggatcgcgggaagcgcctccgggcgtttaacattcactcaacctatcaggcgctttgtgcgagagcaagttcctcatctcggggttcgatacgctcgtcgccgttatacagccgcgcatgttgcagaccaacgaataaacgctcgccacgctgcggggcatcgtcgccatgcatcacgaccgtcagcggttcgttgtaccaccccagcggctgcaccactaattgggtgtagtgacctttcgggctggcttccagtacctgtaccggcagcggcgaatcgaggctggtacggcggctgatatccacttcccacgggcgcaggaagagatccaccggcccctgatacgcaggtgtgtagcccagcggccagcgatgtgcgccaacatggaactgcccgccgcgaatggttccctgcaggcggttcacttcgcccataaattcgagcacaaaacgggtcgccggttcgcgccatacctgatccggcgcgtcagcctgttcaatattgccctggctcatcacaactacacgatcagctacttcgatcgcttcttcctgatcgtgggtcacaaaaacgctggtgaattttagttcttcatggagttgacgcagccatcgacgcagctctttacgcacctgcgcatccagcgcgccaaacggttcatcaagcagcagaatttgcggttctacagcaagcgcacgcgccagcgctacacgctgtttctggccgccggaaagctgcgccggataacgatccgccagatgggcaagctggaccatttccagcaattttgtcactttcgctttgatggctgcggcattcgggcgctcgcgacgcggcagcaccgtcaggccaaaagcgatattgtcgaacaccgtcatatggcggaacagcgcgtaatgctggaacacgaaaccgactttacgatcacgtgcgtgcaggcggctcacgtcggtgccgtggaagcgaatatgcccgctggtttgatgctccagcccagcgataatgcgcagcagcgtggttttcccggaaccggacggccccagcaacgcgaccatctgacctgaaggaatatccagtgagatatcgttcagcacctgggtgcgaccaaacgacttcttaatattggcaatctcaatgctcatgattttcctcctgctgcgcgcgtttttcctgattctccaggcgccactgcaacatactctttaaaaacagggtgataatcgccatcagcgtcaacagcgcggcggcggtaaaggagccgactgtgttgtagtcctgctccagcaattcaatctgtaacggcagcgaaagtgtttcgccacgaatcgagccggaaaccaccgacaccgcgccaaactcgccaatcgcgcgggcgttggtcagcactacgccataaagcagcgcccagcggatgttcggcaatgtgacacggcggaacatctgccagccggatgcgccaagcaaaatcgccgcttcgtcttcctgactgccctggcttaacatcaccggcaccagttcgcncaccacaaacggacacgtcacgaagatcgtgaccagcaccattccgggccaggagaacataatttgcagattatgttcatccagccagccgccgagcgggccgttggagccgtagaacagcagatacaccagaccggcaaccaccggtgacacggcaaaaggaatgtccagtagcgtcagcagtaactggcgtccggggaagttaaagcgcgtcaccagccaggccagcagaataccgaacaccaggtttaccggtacggcaatcagcgcgatcatcaccgtcagccagatggcgtgcagcatatccggatcggccagattctgtaaaaccggcatcagccctttgctgaacgcctgtacgaagatataaatcatcggcaccagcaggatgaacgccgataccagcatcccgatgccaatcagaaaccatttgccccagttaatcgggcgcgcgtcataacgcttcaattgtgtcacttccgccattaatgacctaccacacgccgaccaaagcgactttgcagagtgttaattgagaacagcagcagcagagatgccgcgaggatcaccgaagcaatcgcgctcgccgccgggtaatcaaantcctgtaagcgaacgaaaatcatcagcgacgtcacttccgtcttccaagcgatgttcccggcgataaatatcaccgcgccaaactcaccaagactacgggtaaacgacaacgccacgcccgccaccagcgccggagaaagttccggcagcaccactttgcagaaactctgccagcgcgttgcgccaagcgtttctgccgcttcttcatattccgggcctaactcttccagcatcggctgcacggtacgtaccacaaacggaatgctggtaaaggccattgccaccgcaatccccagccaggtataggtgactttgatatcaaacttcgccagccattcaccgtaaaaaccgtttacagaaaagagcgaggccagcgttaaaccggcgactgccgttggcagcgcaaagggtaaatccatcagcgcatcaagcagcgtgcggcccggaaagcgataacgggttaaaatccacgccatcagcaggccgaaaacgccgttaaaaattgatgccacaaacgccgacagcagcgtcactttgtaggccgcgaccacctgcgggttggtgatcacttcccagtactgcgcccagctcatctcagaaagctgcatcaccagcgcggagagtggcagcagcaatatcaggcacacaaacagcagactggtgccgaggcttaaggtaaagcccggcaggacgcgtcttgatgaaactgcaaacattaattacgccccgccgctaacagcttgtctaactcgccgccgctggtaaagtgggttttcatcacttccggccangagccaaatttgtcttccacgcggaacagttcggtctgcgggaatttatctttcagtttgtccatgacttccgggttattcacgcggtagtaatagtcggtgatgatggtttgcgcctgcgggctgtaaagccagttcagataggcttttgctgctttttcggtaccgttggcttgcacgtttttatcgacccacgccaccgggaattccgccagaatgttggttttcggaatcaccacttcaaagccctgcgcttcgtactgtttgcggatgttgttcacttccgattcaaagctaatcagtacatcgcccaggccgcgctcggcaaaggtggtggtcgcgccacgaccgccggtatcgaacacttcaacgtttttcaggaactgagtcataaactgttcggttttggctttgtcgccaccgtcagctttatccgctgcgccccatgccgccagataggtataacgcgcgttacccgacgttttcgggttcgggaaaatcagcttcacgtcggagcgcaccaggtcgttccagtcgtggatattcttcgggttgcccttacggaccaggaagcccatggtggagtagaacggcgagctgttattcggcaggcgcgactgccagtccgccgggataagcttgcctttatcgtgcagaatttgtacgtcggtcacctggttataagtgacaacgtcggcttttaagccctgcaaaattgccagcgcctgttttgatgacccggcatgagattgttttatcgtcagtttgtcgccgccgttatctttggcccattgctgttcaaacggcgggttcagggcggcaaacagctcgcgggagacgtcataagaactgttcagcagttccgttgcctgtacatggcccgccagcagcagagaagcgaccagcgcgagtgagttctttttcagtaagttaacggccattgcgcacccttataaatttaatgactttctaatagccatcatatttataacggacgtgaaaggagtaacggttttatataccgtttggtgatttggaagttgaaaagggaataagacgaaatcctccccacaaatgcagggaggaaacagaggtgaatcagataccgacgctaaccgtctccggcagtgtgctgccgccatcaatcacattctgtgtaccggttaaatagctggattcatccgatgcgaggaaggccgccagttcgccgacttccagcggatcggcgaggcgacgcagcgggattgcttttgccatttcagtcagcaccgactctggatcttccgggttcgactggcgggcaatgctttccgccattggtgtgcgaacgtatccagggcatatggcgttaacgcgaataccagactgcgcatactccaccgccagcgattttgtcaggccaacaatcgccgctttcgttaaggcgtacgccgtttcacccggatcggccaccatatcaccagtgactgaagacatcatcacaatgcgaccatctttgcgggcaatcatctccggcagcaccgccttcgtgacgttccatacgcctttaatattgatgtcaatatggaaatcgcgatcgtcatcgctcatatcgaggaaactgcccagacgacaaacgcctgcgttattcaccaggatatcaatgcgcccttctttttccttcgcgcgtttgatagctgcggctaccgacgccgggtcacgcacatcggcgacaaccgccgtacagcgatgaccacgaccacacagttcgtccgccagcttttcgatctcaggggagatatccagcaagattaggtttgcgccatgacgcgcaaaagttctggcaattccttcgccaattccctgcaatgcgcccgtaatcagtgctgtcttgcccgtgagtttacccattttaatgctctccttgttaatacagagcgttacactccattccctctgaaaatacaggataaacaaaatattactgcggatcagctcactaattcaggaaaatctcaatccagtcgctgctttatgcatcatttcaggcgttgtgttagctcactgctgcgctgaatcattttcaatgactccacatcattgagttgcacaagaccaacaaacagtaaatcggtaacagaattttgcgccgtgcgggtagacatcgacgagctacgccattcggtttcaccggaaacggtatcgagcgtgaaatgcgccagccgccgcagcggagagtcagccagagaagtaatggcaatcaccgttgccccctgctttcgtgccgcttctgcgcacaagacaatctcttttttactgccgctgtaagagatagcgatttgtacatcgccttttttcaacgcctgggaaacggtggcttgtacgtgcgtgtcggcttcgcaggccacgcgatatccaattttcatcagtttgaacgacagatcgcaccccaccagcgccgatccgcccaggcccgttatctggataaacggtgctttactgatgacctcaatgattttttgcagccgcgcgtagtcgaacaacgcacaggtttgctccagcgccagctctttttcgcgattcaatttgcgggcaatcacttccagcgaatcatcactggtaatcgaactgtgcaggtgctgcgccgtggcattcgttttctcccggctggcactgtattcgcctattaacgccatacgcaattcagtaaacccttgtgcgccgagcttctgggcaaacttcacaatactcgactggctgatgccgagctgtttcgccatcttgcgcgaagagacggatttcagctcactcacgttggcccgcagaaagtcagcaattttttgctcgttctcggtaaattcactttccgcattgcgtattttcgtcaggtacaacatcttccactctcctgggctggcagcaaaaattccgcttaagttcttatgacgctcttcacactctgcgagtgtagactcaatgattcctttaagtctgtcaattcgggatatatgattccatacatctgcaattatttgatcgtaaatagtaaggtcaccaccgatgcaacttgaaaagatgattaccgaaggctcgaacgccgcctcggctgaaattgaccgcgtatcaacgctggaaatgtgccggattatcaacgatgaagataaaaccgtaccgcttgccgttgagcgcgtactgccggatatcgccgcggcaatcgatgttatccacgcccaggtaagcggcggcggtcgtctgatttatctcggtgcgggaacatccggtcgtctggggattctggatgccagcgaatgtccgcccacctacggcgtgaaaccgggtctggtagttggattaattgctggcggcgaatatgccattcagcacgcggtggaaggcnctgaagatagccgggaaggcggtgttaatgatttgaaaaacatcggattaaccgcgcaggatgtggtggttggcattgctgccagcggtcgcacgccgtatgtgattgccggactggaatatgcacgccagctcggctgccgtacagtgggaatttcctgtaatccggggagcgccgtttccaccaccgctgagtttgctattacgccggtggttggggctgaagtggtcaccggttcttcgcggatgaaagcaggcacggcgcagaaactggtgctcaatatgctttccaccgggctgatgattaaatccggcaaagtgttcggcaacctgatggtcgatgtggtcgccaccaacgaaaaactgcatgtgcgccaggtcaatatcgttaaaaacgccaccggatgtaatgccgaacaagcggaagcagcgttaattgcctgcgagcgcaactgtaaaacggccattgtgatggtgctgaaaaatctcgatgccgcagaagctaaaaaacgcctggatcaacacggcggctttattcgtcaggttttagacaaggaataacccatggccaaagagatcagcagtgaacttctgaacaccattcttacccgtgtcggcggaccgggaaatatcgccagttgtggtaactgtatgacgcgcctgcgtctgggtgtacatgacagttcactggttgatcccgatatcaaaacgctggaaggcgtgaagggcgtcattttgaccagtgaccaggtgcaggtcgtttttgggcctggtaaagcgcatcgtgccgcaaaagcgatgagcgagctgctgggagaagcaccggtacaggatgccgcagaaatcgccgcccagaacaaacgtcagttaaaagccaaacaaacctccggcgtgcaacaatttctcgccaaattcgccaccatcttcacgccgcttatccccggttttattgccgccggtctgctgctggggatagcgacgttaattgccacggtgatgcacgttccggcagatgctcagggcacgctacccgacgcgctgaattttatgaaggtgttcagcaaaggtttgttcaccttcctggtgattctggtgggctataacgccgcccaggcatttggcggcacgggcgtcaatggcgcaattattgccgcactctttttgctcggttataaccccgctgcaaccaccggttactacgccggttttcacgatttctttggtctgcccatcgatccgcgc

SEQ ID NO: 1358 - DNA, 16827 bp, Escherichia coli
  Strain O55:H7
  modified_base (2781)..(2781): a, c, g or t
  modified_base (4992)..(4992): a, c, g or t
  modified_base (5809)..(5812): a, c, g or t
  modified_base (6353)..(6353): a, c, g or t
  modified_base (9496)..(9496): a, c, g or t
  modified_base (9502)..(9502): a, c, g or t
  modified_base (11627)..(11630): a, c, g or t
  modified_base (13426)..(13426): a, c, g or t
  modified_base (13434)..(13437): a, c, g or t
  modified_base (13747)..(13747): a, c, g or t
  modified_base (16823)..(16826): a, c, g or t
tatcggcgtgttgattgccgcgtgggcctgcgcccgcatcgaaggcatggtgcgccgctttatgcccgacgatctcgacatgctgctgacctcgttaatcaccctactgatcaccgctacgctggcctatctgatcattatgccgctgggcggctggttattcgaaggaatgtcgtggctgtttatgcacctgaacagtaatccgctcggttgtgcggttttagccgggctgttcctgatcgccgtggtatttggcgtgcatcagggctttattcctgtttacctcgcgttaatggacagccaaggattcaacagcttatttcccatcctttcgatggcaggcgcgggccaggtgggcgcggcgctggcactctactggcgggcgcaaccgcacagtgcattacgcagtcaggtacgcggggcgattattcccggcctgctgggcgttggcgaaccgttgatttatggcgtcaccctgccccgcatgaaaccgtttattaccgcctgtttaggcggcgcggcgggcggtttgtttatcggattgatagcctggtggggtctgccgatgggcttaaacagcgcctttgggccgtctggtctggtggcgctgccgctgatgacttcagcacaaggcattcttccggcgatggcagtctacgctggcgggattctggtggcatgggtttgcgggtttattttcaccacgctttttggctgccgtaacgtcaatctggactgatatcatgaaacggacaatgctctatctttctctgctggctgttagttgtagcgtcagcgccgcaaaataccctgttctgacagaaagttcgccagagaaagcagggttcaacgtcgaacggcttaaccagatggatcgctggattagccagcaagtggacgccggttatcccggcgtaaacctgctgattataaaagataatcagattgtgtatcgcaaagcctggggagcggcgaaaaagtacgatggcagcgtattgatggcgcagcctgtaaaagctaccaccgggacgctgtatgacctggcctcaaacaccaaaatgtatgccactaacttcgctctgcaaaagctaatgagcgaaggcaaactgcatcctgacgatctgattgcgaaatatatttcggggtttgccgatagtccaaatgacaccatcaaaggcaaaaacacgctgcggatttctgacctgctgcatcacagcggcggtttcccggcggacccacaatatccgaataaagcggtcgcgggcgcgttatattcccaggataaaggccagacgctggagatgatcaagcgcacgccgctagagtatcagcccggcagcaagcatatttacagtgatgtcgattatatgctgcttggatttatcgtcgagtcggtcaccggtcagccgcttgaccgctatgttgaagagtcgatttatcgcccgctcggcctgacacatacggtatttaacccgctgctgaaaggctttaaaccgcaacaaattgccgccacggaattgaacggcaatacccgcgatggagtgatccacttcccgaatatccgcacctccactctctggggtcaggtgcacgatgaaaaagccttttattcgatgggcggcgtttccgggcacgcaggtttgttttccaataccggcgatattgcggtgttaatgcaaacgatgctgaacggcgggggctatggcgatgtgcagctgttcagtgcggaaacggtgaagatgttcaccaccagctctaaggaagatgccacttttggcctcggctggcgcgtgaatggtaatgccaccatgacgccgacgtttggcacgctggcaagcccgcaaacctacggtcacactggctggaccggaacggtgaccgttatcgatccggtgaatcatatggcgattgtgatgttaagcaacaagccacattcgccggttgccgatccgcaaaagaatcccaatatgttcgaaagcggtcagctgccgattgcaacgtatggttgggtagttgatcaggtgtatgcggcgttaaagcaaaagtaataaaaaggccagtcagtaatgttactgcctggcctttaatcaatgaatcagaaacgcttacagcgccatcaacttgtccagcgacggtgcgaaataatagccgccggttaccggtttggtgaaacgcaacatcgcatcacgcttaccatcggtatcgccaaacatgctcagcagttgctgctcaatgttatgcagacgcgcgcagtaggcgcagaagtacagaccgtgagtgccactggcggtgccgtacggcaggctctggcgaacaatcttcagccctttgccatcttctttcagatcaacgcgggtcaggtgagaggtttccggacgttcgtcgccgtcaatctcttcgttggcctctttggtgcgcccgatcatcatctcctgatcgtgaacgctcatccggttgagctgcttcaggttgtgctcccaacgctgcacaaacacatagctgccgccggcatccacgccgtctttgataaccgccacttcgcgacgcgtctcttcacccgccgggttttctgtgccgtcaacaaagccgctcaggtcacgctcttccacccaacggaagccgtggatctcttctttcacttcaatgcagtcaccaaaggcttccatcgccgcctgggcgacagagaagtttacgtcgtgacgcagagaaagaatgtggatcaacacatcgaactgggtggtcggcgcaaggcctttaccgtagcccggaaaatctttcagntcttctgccccaacgccgccgctcagagcgcgccagatgttgttaccaaaggcaaccaccgcaccaagatgcgcgtccgggaatttcgcttcaaaagttgccagtttgtcggcaaatgttttactggccgcacgcagggcgtcaacttcccctttcacgttggcttcgatccaaatcgccgcgcggcaatgttctggcaaaatgccactctgaacctgagacattgttcctcctgaaaataataatgccacgcaatccgtggcattgttgagcgctattttacgtgttttttcgcggcggcggtttgttcagacgcaaattaacgccgccagataattttactgactttccagtttttcagggtatcgtccgaaggcattaacccttcaggaccactccattccccgctgaactggtagctaatatgttgactgccttcggctttacattcgacggcacgattatcatcaccatcagctttttggcaattgccaaatgctttgctgtaaaggtcgctaaacggtgtaccgattttaacaccggtgtcagcaggaatatcgctatccagcacgtcaatgcgactgatcgtgccttgatcgccgttaatcaccatcgccacgttgtcgcccttcatcacttcaaaaaagcgcaccacgttgccgttcgcggttttcattccgctgcgcaggcgataatcgccatcaagcgcatcggcaatggcttgttcttgcagtggtgtggacgccgttaattcaccaacgccctgctcgctcactttggtggacgacccaaaccagttccacgggttagcggcagaccagttaactgacgacatcgtggaacagccggtcagcatcaatggcatagcgcataacattaaacgcagcgatttcatgtcacttcctttggttattcaataacgttgcttggagtgcaaattcaccaaaaagtgccgttattcttttacttcattaaaacaagcgcgtaaacgtcgattggtcagcagccagattaacgccacaatatccgccactaccagcgccagaccgataccgctaacggattcaccgttcagccacagccacggttgccagcaaagtaaaaccacctgcgccaacagcaacagaaaatagagtacacgccaggtgcgaggaaacgtagcccgccgaccgctcaacaaaaacgccagcaccgccggaatgccaggaatcagccccagccagaaattatcgtgatcgggataaaacagatttagcagcgcagtaccctgctcgcgcgacgcaccggcaatgacaaacagcacccaggttcgcgcctgaagcaatagcacaagccagaagagcaagggtaaacgcaggcgaccgtgcgcatcataatggacaggatgaaactcagtactcttcatcttcaatcaaacgcttacccagactcagcacgtcggcgtgttcatatcccaggcgttcatacattccgagcaccatgtcgttatcttccggcacgttgatctgaattttcgggcagccgcgagcaatcagctttttctccagccggttaagcaacgcattggcaatcccacgcccacgaaactctggatgcacgccaagataataagcagacccgcgatgcccgtcataaccgcccatcaccgttccgaccacttcaccgttcacctcagcgaccagaaacaaactgacgtcatggttcatcttacgctcgatgtccatttccggatcgttccacggacgcagcaagtcgcaacgctcccaaagggtgatgacctcttcgaaatcttcctggcgaaatacgcgtatctccatggtattcgttacctttttgcgggttaaaaggctgattatggcgtgaacggtcgaattagccaatatctgacgaaaatcggttgaaaaagtggcataatggggagttgtcaactattgaaatgaaaagtaaaacaattctcaacagcaaacggtcgtaacggattacgcgatacgatataacatctggaactttattattacaactcaggccgtatgagcacttttaaaccactaaaaacactcacttcgcgccgccaggtgctgaaagccggtttggctgccctgacgttgtcaggaatgtcgcaagccatcgccaaagacgaacctttaaaaaccagcaacggacacagcaagccgaaagctaaaaaatctggcggcaaacgtgtcgttgttntcgatccaggccacggcgggattgataccggagcgatcgggcgcaacggttcgaaagaaaaacatgtggtgctggcgattgctaaaaacgtccgttccattttgcgtaatcatgggattgatgcgcgtttaacgcgttctggcgatacgtttatcccactttacgatcgcgttgaaatcgcccataaacatggcgcagatctgtttatgtcaattcatgccgatggctttaccaacccgaaagctgccggtgcttcggtatttgccctctctaaccgtggggcaagtagcgcaatggcgaaatacctgtctgaacgcgaaaaccgcgccgatgaagttgccggtaaaaaggcgactgacaaggatcatctattgcagcaagtgctgtttgatctggtgcaaaccgatactattaaaaacagcctgacgctcggctcgcatattctgaaaaagattaagccggtgcataaactgcacagccgcaacaccgaacaagccgcgtttgtggtgttgaaatcgccgtcggttccttcggtgctggtggaaacctcgtttatcaccaacccggaagaagagcgactgttaggcacggcggcgtttcgtcagaaaatcgccacagcgattgctgaaggcgtgatcagttatttccactggttcgacaaccagaaagcacattcgaaaaagcgataagttatgaaacccgacgcacaccaggttaaacagtttctgctcaaccttcaggatacgatttgtcagcagctgaccgccgtcgatggcgcagaatttgtcgaagatagctggcagcgcgaaggtggcgnnnncgggcgtagtcgggtgttgcgtaatggtggtgttttcgaacaggcaggcgtcaacttttctcacgtccacggcgaggcgatgcctgcttccgccaccgctcatcgcccggaacttgccgggcgcagtttcgaggcgatgggcgtttctctggtagtgcatccgcataatccgtatgttcccaccagccacgcgaatgtgcgcttttttattgccgaaaaaccgggtgcagagccagtctggtggtttggcggcggcttcgatttaacccctttctatggttttgaagaagacgccattcactggcaccgcaccgcccgtgacctgtgcctgccatttggtgaagacgtttatccccgttacaaaaagtggtgcgacgattacttctacctcaaacatcgcaacgaacagcgcggtattggcgggctgttctttgatgatctaaacacgccagatttcgaccactgttttgcctttatgcaggcggtaggcaaaggctacaccgacgcttatttaccaattgtagagcgacgtaaagcgatngcctacggcgagcgcgagcgcaattttcagctctaccgtcgcggtcgttatgtcgagttcaatctggtctgggatcgcggcactctgtttggcctgcaaactggcgggcgcaccgagtcgatcctgatgtcaatgccgccactggtacgctgggagtatgattatcagccaaaagatggcagcccagaagcggcgttaagtgagtttattaaggtcagggattgggtgtaactccctcacccccattcccgcatccgctgatgcaacgtcaacgacggcttctcggcaaacagctgctggtaatccgtggcaaattgccccagatgccagaatccccactgcatggcggcgtcttttaccgttgtgctttgcgaccacgggcttatcagttcgcggcgtacggcgttcaggcgaatgcgtttcagccacacgttcgggccaattcctaaaatagcgtgaaacgcgttttgtagcgtgcggcggctgacatgcagttgattacacaagtccagcaccgtcaccggttcggacatgttttccagcacatattcacgggcgcgggaaagcaaccgacggtaactctgatgactgatgctttccgccgtcaccattggctgcgcttcttccagcatcgcccccatcgccattagcaaattatcccccagcacttttcgcactgcaggctgatggagattttccgggttctcgcaaaacgtcgccagcgcctgttggacaaagccccacagcgcggctttatgctgctctttcacttccagcgccgactggctacgcaacatatgtaatacccgatccggattatgcaaaaagttagcctgacgggtgatgacatcttcagaaagcactacgcccaggatcgtgtaatcgtccggcgtacttaattcaaactcggttccaccagggcgcgtcgctatttctgcgcttcccagacattgcgaaccgataaatccctgctcaccgcgcgtcgccggaatgccaaaccagaacgagttcggccagaccagacacgactgacgcagcgccagaccggtgtattcacgaaaaacctgaatatcatcgagtagaatttccgtaaattcaccatgaaacttgcccggatgcagctgatcgtaaatctgctgccaggcggtaatcgttaaagcatgttcatagacatccgttgtctgtcgttgatgaacattatccacttcgaccttcggcgtgagcttcaggttttcgggtaagggttcatgataaagatggtgcaaattggctgtacgggtctttttcatgatgttaatgccgggtgttgtaggacacccggcacctccgacaggttaatggggcttgagacgataacgactactgcgtttacgtaacgtcccagcagaaaagagctgttcgagcgcatttctggctttttccagcggccagccaaagtgggcagccacttctcctgccgtcattccctgacgtactgatgttaacagcgccaacaactcgtcagcagattccgcgacgataactggcgcgtcgggttcctttacgggttgcttcggctggcggttaaagccagtaaccagccactgggtgtcatcgtctggccgaccgatctccttacggctgatgacacgcccggtacgcatcgcggcagcacaacctgcgtccagcgcagcacgacacgccgccagatcgccttccaccaccagcgttaagcgacctgggtcaagcacttcgtgactgagcagacgaacgttagctgctttgagcatggcatccgctgcatctatcgcggcgaccatgccgtccacttccagcaatcccagtgcattgatcattggcaacctccgttacgcacgctggattggattacgcgcgatttccagcactgcatcggtaaaggcgttacaggccgctttacacgctgcctggctaccggttaaaaatgctgccgagtagttagtttcagacggtggcgggacataggtcaccagctgtacgtcggcagatttcaacgctgcatcaatgccgtaggtcgcttccagcggcggtgccaccagatacgccatcggatcgccaagcgtgatcccggcggttgatgagagataagaaccggtacgcgaaactacatgtgccaggaatgccgtatcttgcgcatcattagcccactggaaagcagcgccattttcaatatgcgcaaccatcgcatccagaccggcacgcacttccgccgggtttggcccaccaagcataatcagcacctcaccggcagtcggtgacgggccgtgtgccgcgcccgcatacagcgagcgaccatataccacttctaccatcgcttgtttggtcgcttcgtcagccgcaatgtaggttacgtcgtcagaatcggcagaaatcagaccgaggctacgaatatgtggcggcaatttcagttcacgcgcaaaatcggcgttaacggaggcaatcacccgcatggcggttaccgacggtcgaatcaaatctaaagctggcatgatgcctccttatcgggtcatgttgatgccggatgctttctgctccagcatacgtttcgccaaatccacaatgacggctgcggcttcaaccggcggcgtgccgccctggtgaatgttagagatacaggtgcgatcggcctcaacggtggtcgccatacgcggcgagtaaacggcgtagcaggagaggctttctgactgacccaaccccggacgttcgcccaccagcaggatcactactttcgcgccgaggatctcaccgatctgatcttcaatcttcacgcgaccataacgaacaaagaatggcgtgccgactttcagcccggcctgtttcaggcccgccatcagcggcggcaggatctcttcgtagttcacagtgatggcatcagttgacaggccatcagaaataacgacctgtacgtccggattagcaacacactgtgctttcagcgcttcaacagcttctgcacacaggcggcggcccatatccgggcgagtcaggtagagatttttgtcgctaatttcggagcgtacttccagcaagccctgcgctttcacccactcttccggcacttctttcagtacggtatctttcgaacgagagtgatcggccaggaaacgcagcagcgccagcgtacncggacncggaccggcacgaccggtacaaacgcgggccacggtgctgcgacgcagttctgttaacacatccgcacgatgtgggttttcaacaccaatccacacttttgcttccgcagaacctaaatccagcgcgcagctttccgaggtcaccggtgccgcacaggtggtagtggcgcactttgcttctgacggcgcgggggccgtttgtcccattgacgccatcacgctgcgtacaatttcttcaatctgtttttgatccatgatgtgttatctccgcgtcatcagaagaacagtgacggatcgcccgcacgtttggtcaggcgaccgtttgccataatgcccatgctttccagccagcgttcaaactccggtgacgggcgcaggttgagtaactgacgcacagtggcggtatcgtggaatgcggtggtctggtagttgagcatgatgtcatcacccagcggcatccccatgatgtagttgcagcctgcggtggcgagcaggatcatcaggttttcgttgaggttctggtcagcgtcagcgtggttggtgtaacagcagtcacagcccatagagatgccgctcagcttgcccataaagtgatcttctaagcccgcacggataatctggcggtcgttgtagagatactccggcccaataaagccgaccacggtgttgacgataaacggatcgtaatgacgcgccagcccatagttacgtgcttccatcgtcacctggtctgcgccgaagttagcgccagcggatagcgctgaaccttgtccggtttcgaagtagaggcagttttccccggcgatacggttgaactctgcacccactgcgcgcgcttcgtcgagcatcgccagttccacgccaaactctttcagccctttttcgctgccacagatactctggaaaatcagtccgccaggcgcgccgcgacgaatcgcttcgatctgggtggtgacgtgcgccagtacgcagccctgagttgggatgttgaatttgtcgatcacgccatagatggtgtccagcacgcggcttaagttttccacgtcgtcagtcaccgggttaacgccgatcaccgcatcgcccaccccgaaggaaagcccttcgtagatttgcgcggcgatactttgcacgtcgtcacgggtgtcatttggctgcaaacgggcgctgaaggtgcccggaataccgatggtggtattggcctttttgattaccggcattttcttcgcgccgtagatcaggtccgcgttggagcaaatcttcgctaccgccgcgaccacttccgaggtcagccctttgcgggtaaaggcaatgtcgtccacgctggtttcatcgctcagcacatactcacgcagttcgctgatgctccagtttttaatctggttgtaggccgtttcgttaacatcgtcctgaatcagccgcgtcacgcagtcatcttcataggcaatcaccggattattgcggatgtccgctacggtcatttccgacaacacctgctttgccgccacgcgctcctgtgagcttgccgctgcgacgcccgccagcacatcccccgaacgcagttcgttggctttagccagcacctcttttacatccttaaactgatatacattgccgaacaatgtggtctttagtttcataagtcgttccctcaggaaggaaatgcgagtgatttcaccgtcaccggcacaaccgatccgccaaaaagaggcgtaccaatgtcgatatagtcccccgcgcggacaatcacttcgtcaatgactgccaacgggagttgttgtagctgtgggcgcaacagcatgcccagagctttaccaaagtcctgcccggccaccaccagcaggggatgcggattcggaaaacgcgcgacgaaatcgaccaacgcgttgatgaccgtcagtaccgcggcgtaacgcacaggcagcgaggcgggaagcgccagcacgtacgcgtcagttttgggatcaagatccagctgaatcagcgcctgttgccaggcactcaccagatccgtttcatcaatcgggatcgccaccggcaaattgcgcagcggcagttgtacgccctccagccagattgtgctgccagagagcgaaagggtatgtgcgcccgcgccaatcaccgtggnnnncacggtttgcgccggaaactgcacgttcatctcacgcaggcgcggatggtcatgtagcgccgtcgccagtagcgggccaatatcggcaaaacagaacgggtcagcgggctggtggcgataacattcgcccacgccgccagaaagcgtaatgatttcgggcgtaacacctgcgggcagcaaaccggtttgcattaatgcctgcgcgagcggcgaaagcgttccgtcaatcacttcgacaatcagctctgccatccgtcgggtaacctgcaccagctgcgcgccggtcagcgaacggacgtcagtgcctgcaccgaaacactcatccacaatcatctgccccggtttatgagcgtaaaccacgcgcccctggctgtcggtttccagcaggcgaccaccgacgttgaggcaggcagtgccgctgatttttccggcatcgaacagggcgtagttcgcggtgccaccgccgatgtcgatattcagtacccgacacagccgttgttcagaaagggtttgcgccccggcaccgtgaccggcgatcacggattcgaggtgcggcccggcgctggcgacgacaaaatcgcccagcgactgagagagcgccatcaccgccgggcgagcattgcgggttttcgcgctttcaccggtgatgatgatggcaccagaatcaacgctttccggcgcaatgcccgcagcctgatattgctctaaaatcagcgatttcagttccgcttcttttaaaccaccctgtttatcgacaggggtaaagaacaccgggctttgccagctaatttcgcgtttgatgaattcgtagcgcggcacctgcgacaccgccgcacggttaaccagttccaggtgggagaaaatcacctgggtggtggtggtgccgatatcgataccgacgctcagtagctggcgagtgttcacgattgtgcctccgcttcggttttagccgcggtcgcgtcgtcttttggcaccagcatcatcgccacgccaatcgccgttacgccgccgatcaacttgccgacaatcatcgggaagatcatggcattcatgttggcagcggcgaagcctaagtggtcgcccagggcgaaagcagcggaaacggcgaaggcgcagttgatgactttgccgcgggtatccatctgcttcatcatgccgaacatcgggatgttgttggcaagcgttgccaccatgccggctgccgcgatgttgttcatattcagcactttaccgacgctcatcagcggtttttcaaaccagcgggtcagcagcagcaccatcggatacgcccctaacagaacgcaggagatagaaccgataacttcaatggcgcgcatcacctcaccgggtttatcgccaggggccataaagataggatccagaccggggatcagttcccagccaagcaggaatttcactaccgcagcggcaagaccgagggtgatcaatgcaacgaggaatttggcgaagatctggaagccgttgatcattttttctgggatgaatttcagccccagcgccaccagaatcgcaacaatgatcaccgggatcatgttcatcaggatcagggcgaaagtgaattccaccggctggccgttgatctgaacaccggagtacatagcaaccagaccaccagcgatacaaccaatcggaatggtcacaatgcccgccagcacgccgagcgccagataacgacggtcagaaggttcgataatgccgagcgccaccggaatggaaaacacaatcgttggccccatcatcgacccgagaattaacccagagtatagccacgcggntacgtcgnnnnccgccagctctttggcgaggaagaagccgcccatatcgcacgccagcagtgttccggcgaacatcgatgggttagcgccgagcatttcgtaaaccggaataattaccggcccgagtacgtgagccagtaccggtgccagcgcggtcataccgaccatcgccaggcccagtgcgcccattgccataaagccttcttcgaactgaccgccggatccttcgatacttttaccgaacttaccgaggaaacgagcagaaccgccgaactgtgacaggatcctgtctacggcagctatcagcataaagaacatcangatgtacatgatgatttcgttaattcccatcgcctttactccctgttagttgttatttattagcggatgctgcgtgaagccttatccgcactacatgtgcaatcccacagaccggataagacgcggcatttattgcgccgctgcgtacaggccgacaagctgttccaggctggcggtacgcgggttgctgcgcagacaaatatcttccagcgcggcctgcgcccatgcaccgtaatgcgcagatgtcgcgccaacatcgcccagtcgtttaccaatcccaacttccgcaatcagctcacttaccgcgttaatagcgtcacgatcgtcggattttttagttcgcagtgcccgaccaatctgactaaagcgttcgcgacaaaccatccggttaaactccatcaccgttggcagcaacatagcgttcgcgagaccgtgcggaatatgcagcgccgcgcccggctgatgcgccatcgcgtggcacaacccaagacccgcactggaaaacgccattcccgccatacatgaagccagcaacatgctctcgcgcgcggcaaggtcgtgaccgtagcccaccgctttcggcagcgatttgccaatcatcgcaatggcaccaatcgccagactgtcggtaaacggtgtagcgttcagggcgctgtatgcttcaatggcatgggttaacgcatcaatgccggtcatcgccgtgacatgcgacggcacaccttcggtcaatgcggcgtcgaggatcgccacatccggcatcagcgaggcatgggctaacacctgcttgcgcccgctcaccgcgtcgataatcaccgttacattggtggtttcagagccggttccggcggtagttggaatggcaatcagcggcaagcgcggttgcagaacgctggtttctgacatctctgccagcgtgctatccgggttcgtcaccagcaacgccacggctttcgccgcatccagcaccgagccgccgccaaatgcgatcaccccgtcacaacctgactcacgcaactgcgccacggctgcacacacgtcggtaatacacggttcgcccaccggacatggccagagcgtcatggcgatacctttaacggccaggctacgcgtcagcccggcggtcatccctgcctgatgcaaaaagctgtctgccatcacgaacagatgtttcagcccacgcgtttgcgcttgctgtccgcaactgctcaccgagcccggaccgcaaagcgtcaccggtggaacgctaaatgtttttacccgttgcagattcagggtatcgaacgcctgaaagagcgcggtctgcaattcattttgcatatagcccctccgctttctctcgcccactactggcgatcgccagcggggtcataaacaaactgtgctgcggtaaatgcacctgtaacgccgggaattgtttgcgaaacagttctgccacgcccggttgcatacaggagccgcccgccagccataaatcagtaatgccctgcccttcaatatgccgggcgacaatgtccgccattttttcgtacaccggtttcaccgtaggccaaatctcttcaccgtgaccgcgcttgtactgctccgcctcttccagcgaaatacggcgatttccggcgagagtcagagagatgtgatgtccgccggtggcttcatccgccgagtacgtcactttgccctttttcacgatggcaatgccggtagtgccaccgccgatatccactacaccggcgttgtccagttgcagcagatccgcgactgcggttggctcatccagcacatggctcacttccagcccggcagactccagcacgttgatggaaatacgcgggtccgtacctggaggaaatgaagtcgccgcatggctaaaacgacgaccgaattgctgctcgagcgtgtcgagatggcgacgaacaatggtgaccgcgccgaagaaatcccagacgatgccgtcgcgaaccacatcggcccagtcgaggcataccgccactggctgaccgtcgcggtcgacaaccatcgacaccacatcgcaggtgcccagatccactcccagccacagcggagattccgtcgcggcgggcgtctggttacacagcgttgccgccgtttgcagacgtggggtgagccattgttcgtcgtgcgccatctgttactccttaaacaatgcgaaacgcatcgactaatacacagcgacgcagacggacaaacgtacgcgcgctggttaccccttcaccggttggcgtggtgatggtcatggtggtccagccttccccgcccagccccagcccggcaatgcacggtccgttcttaacgaaaatgctggtatcaatagcattcgccatctggttcatgttttcgatgttgcgcgagtgcattgccgccgtgtggtggcaaccgccttccagtttcaccgctagcgcaatggcatccgccacgttggcgacgcgcacgacgggcaacaccggcatcatcagttcagtcacggcaaacggatgttctgcggtggtttccacaaacagcaggcgcgtttcttgcggaactttaaggccgattgccgccgcgattttgcctgcgtcgcgaccaacccagtcacggctgacggtgccttttccgcgctcgtcgatatttttcagcaacaccggttgcagctgctgcgcctgttctgcggtcagtttcaccgcgtgctggccttccatcagacgcatcagttcatcggctacgctatcaacaacaatcagtaccttttcgtcggcacaaatgatgttgttatcgaaagacgcgcctttgacgatggactgagcagcacgggcgaggtcagcggtttcatccaccactaccggcgggttgccagcgcctgcggcaatcagacgtttattggtgtgtttacgcgccgcttctactaccgcttcgccgccggtcaccaccagcaggccgatacccggaaacttgaacaagcgttgcgcggtttcgatatccggatttgccacagtaaccagtaagttttccggcccgcctgcggcaacaatcgcctggttgagcagcgtgatcgcccgctgggagacttttttcgccgccggannnng

SEQ ID NO: 1359 - DNA, 1654 bp, Escherichia coli
  Strain O55:H7
aatgacgctgttgcccgcggcaatcaggctgatggcgttattaattacggttgccgccgggttagtggacggcgtcaccgaagccaccacgccccagggcgcgttttcaattaaagtcaggccgttgtcgcccgtcagcacttgcggagagagacactcaacgcctggcgtgtcgcgtgcctgagcgacgtttttggcaaatttatcttcaacgcgacccatgccggtttcactgacggcaagttccgctaaatctctggcgtgtttttcgcctgcttcacgaatggcagcaatggctaactggcgcattgccacgctctttaacccttgctgggcaattttggctgccgcaacagcgtcatccagggacgcgaaaacgcccatctcatgaacggcggcgggcggcgtgtcactgctttgcattttcagcagtaccgctttcaccacctgttcaatatcctgttgattcatgatgttctgccttatttgtggaaaattacctgaccgccagacaccacctcatcgacgatgccaatcacgcacagatcgaccggtgacgtttcgcttttatgcgcctggcgggcggaactgccactcaccagcaacacccactccccggttcccgcgccaatattgtcgatggcgacggcacattgcccgtcaggattaccatgtggatcaatcatttccaccatcagcaatttgtcatgcgccagtccgtgatggcgtacggtacaaacaatttgtccagtgacgactgccagtttcatacccgcctccgtggcgtatttcaggtaaaagctccccctaccctccgcggaaggtaaaatgaaaaatgagagagcgtgacgcccgaatcgacgtcacacagggtgattacaggttgctgctatcgcctttcaggccgatcgggaacacttcttccaggtcgccgtgcggacgcgggataacgtgtacagataccagctcgccgatacgctgtgccgctgcggcaccggcatcggtcgccgctttacaggctgcaacatcaccacgaaccatggcagtacacaggccgccgccaatctgcttaacaccaaccagcttgacgcgcgcagctttcaccatcgcgtcagaagcctcaatcagtgcaaccaggccccgggtttcgatcattcctaatgcttccattgtgctttcctctttatcagggtccagaacgggaccgttcattcaaccagtgtttgtaaactgctttcgcggttcacttctgtctgacgcggcacagctgccaccagcgccagctcgataatttcctgcacactacaaccacgagagagatcgtgcatcggcgcggcaagtccttgtatcaatggcccgacggcacgatatccgccgagtcgttgtgcgattttgtagccaatatttccggcttccagcgacggaaaaaccatcacattggccttgccctgtagcgggctggcaggcgctttttgcgccgccacttccggcacgaaggcggcgtcaaactgcaactcgccatcgactaccagctttggtgcgcgctcacggacgatttctgtcgcctgctggacattggcaacgcaggggtgacgggcgctaccgttactggaaaacgacagcatcgccacgcgcggctcttctccggtgatgg

SEQ ID NO: 1360 - DNA, 33 bp, Escherichia coli
  Strain O55:H7
ttcggcgctggcaagcgcgatatccgccagctg

SEQ ID NO: 1361 - DNA, 12697 bp, Escherichia coli
  Strain O55:H7
  modified_base (1896)..(1896): a, c, g or t
  modified_base (4418)..(4419): a, c, g or t
  modified_base (4628)..(4628): a, c, g or t
  modified_base (4784)..(4784): a, c, g or t
  modified_base (4786)..(4786): a, c, g or t
  modified_base (6654)..(6656): a, c, g or t
  modified_base (6913)..(6913): a, c, g or t
  modified_base (6973)..(6973): a, c, g or t
  modified_base (10927)..(10927): a, c, g or t
gtggtaccacgctgcaatcggcaaagcccaacgccggaccgctgtactgtggcagcatcaggaaaatggatgagagcgttttacagcctggctgcaagccgataatgcgtaatccggcacgcagcacattcgccgtggaagagaggttgcccgcgatacagacatccgctttaccggcgctgaccattgcggcggcgaacatcagcggatcggtaagtttttccagcgcatccggcggcgttttttcgcccgcgcgggccagccagcgatgagcaaattcttcccgcattgcgaggttgccatgcggatctatcacctgtagcccgtccatcgccacgccgtgactgagcgcaaactgacgaagttcaaacggattggcgaccagaatgggcgttgccagaccttgttgatgtaaatattgcgcagctttcagcacacgttgatctaacgcatccggaaaaaccactctggcgggcgctcgcaacgccagttcacaacaacgttcaataatcattgcgtttcccccagtcgttgttggatctgcttcaccgttagcggctgcttcgttacgctcaggatcatcatcacgtagaccgtgctggaaaggcggttcagcgcctgcaagatgtccgggcgtaatacttcaaaactgcgggtgataaacacctgcgccgctacggtttcggcttcccgcactttggtgcgtagcagattcagcaacgccgcatcgcgcccgtggcttgcttccggcaccagatgatcgtgaccaagataacgcaacggctgatgagaaagccggtgcagatcttcgtcagaaagcccgacaatcgcctggcagcccagcggttccgccagttcaatttgcagccacactgccagcgcaatggtgctgtcgagaactgcgcgaaaacccagacgcggatcgcttttggcgaccattttttccgccgacaggtgagtcagcgtatccggcttttttgccaccggctggcggcacagttcgcagcacgcctgcggatgttcatcgctactggttagcccatgaacgggctgcggctgctgctgttcatcgtcaacaaacaggcggccctgctcgtcaataaacttgatgcgcagatggcggctttccagcaactcccgggcagagggcgtcaggcgactgtccgcagggagatggatctctgcgccttcgctgagcgtatggttcgctcttagccatgcttcggtgatgaaatctttcatagggattgccagttagccggccaggcgacatacaggaatttcacgctggatgtcgtaccaaattcgatgctggagcctttcgggataaacatcacgtcgcctgctttagcgatcatggtttcgccttcgtggcgaacatggagctccccttccagcaccatgtcgatttcgtcgtagttcagggtccacgggaagaatgcgttctcccactgcataaaaccggcggccatgctgctgccgtcgtctccggtcacaagatcagtcaagcccacgcaatgcggttgtgcgccatcaaagcgaccaaacttgacgctgctaccatcaatcactttgatgccgcctttgccggtcaccgatttgaagctcggctgcattgcaccctgctccagcgactgtttttccttcatcactttttccatcagctgcgcgaccaggctttcggtaaactggccttccggtagctgggcgataatggtttcgcggatgcgctggctttcggttttatcggctggcacgctggcgggcacggacgccgtcaccgggatcaattcatcacattcggtgatggtaaaacccagtagatccgccacttcacgggcttccggggtaataatgatggcgcgcagaaccacggacattgcctgttcgccgcgngcgtgtgcttcacgaatatcattcgctgtgatgagttttttcacctgcttcctcctgtttggtgagagatgccagataatccaccagttgctgcacgctttgcgggtcgtggctgtttagctcgaaaatcggctcctcgaagcccgtctcaagcaataactttcgcgttgcggcgacgtcagcatccggcatgtccgttttactgatgacggcgatttgccgtttgctgacgccaatatccagcaacccggcaggcaaccgactttccgggtcattcgcgccgtggacatagatcagcatgtccacatcctgtagcgtggtaattaaggcgtgataccagcggggatggctaaaatattcacccggcgtatcaatatcgcccttatcattaaattccacggcctgtgtttttctggcgagggtataattcccctgcaacgcattaaataacgttgttttccctgccccgacggtacccacaaacgcaattcgtttcatgaatgcctcgtattaacttttggtcatttcacaaagcgtataatttaataagcgacctaaaccactgacggtttgtgataacgcttcttctactgcgcccaccgagccataaatcaccaatgcaccactgaagcggtcgagaaatccgatatgcacatcggcggctttcagcgctaaatcaccggcgatcatcgccgtttcgccgggagttagcgtcataatgccaattgcgcccgcatccggaacgccgattttcttcgccagttcctcgccgggatgcgcgatgagatgcgccagtgtgacctgtttgccgggcacaaattcctgaatgatgcgttctttatccatgagtcgccgcctgtgaaaaactttcgtgtatcgtgacaatttttcgtcagagtaaataacaaaattcggcaagcgcgtttaaaaggtgaggtagatcactaagaatggagagatatttactgttatgaataaactttcatatgcgacgcatgaatataaataaaataatatcgagatattttatatactgctttttttattattcgcaaactcagtaataagctttactaatatattgcagctaaaccgcttaccctgaatattcagggtaagcgtgagagttaaaaaagaattacagcggttgggtttgcgcttcaaccacggccagcgccaccatgttgacgatacgacgcaccgatgcgatcggcgttaacacgtgaaccggtttcgccacgcccatcagcaccggaccgacagtcacaccttccgagctggaaacgcgcagtaagttgtaactaatgcgggcagcttccatgttcggcatcaccagaatattggcagaacctttcaaagggctgtccggcatacggtcgttgcgaatcgcttccaccagcgctgcatcgccgtgcatttcaccatcaatcatcagttctggcgcacgttccctgaccagttccagcgcctgacgcattttgctcgacgacgggcagtcagaagaaccaaagttggagtgcgacaacagagcaacgcgcggttcaataccgaaacgacggacagtttctgccgccatcaaggtgatctccgccagctcttctgcgtctggttcgtcattgacgtaggtatcggcaataaaggtgttaccactcggcagcagcagcgcgttcattgcacctgcggtgtgaacgccatcgcgataaccaaagacatttttcaccacgctaaaatgttcatgataatcacccaccgtaccgcaaatcattgcatcggcttcgccacgctgaaccatgatcgcgccgatcactgtcgggttactgatcagcgcccgctgcgcctgttcctgagtgacgccgcgacgcttcatgatctggaagtattcggtccagtactctttaaagcgcggatcggattcgttattgacgatctcaaaatcaacgcccgctttgatctgcaagcccagtttctgaatgcgcatttcgatcacgttcggacgaccgataaggatcggtttcgccagtcccagcgttaccagttcctgagtggcatgcagaacgcgcgcctcttccccttccggcagaactacgcgcttcggcgctttgcgagcctgggagaaaatcggcttcataaacaggttggttttgtaaacgaactcagtcagcttgtcgatgtagacgtcgaaatcagcaatcggacgcgtcgccacgcccgactccatcgccgctttcgcgaccgcaggagcaatcttgactatcagacgcggatcaaacggttttggaatgatgtattcagggccaaagctcagatcctgatcgccatacgctgaagccaccacttcactctgttccgcatgggccagttctgcaatcgcgcgtaccgccgccagtttcatctcttcgttgatggcggttgcgccaacgtccagcgcgccacggaagatgaacgggaagcaaaggacgttgttcacctggttcgggtagtcggaacggccggtacagatgatggcatccggacgcacttcnntcgccagcggcggcagaatttccggttccgggttcgccagcgccaggatcattggcgctcgagccattttcttcaccatttcctgggtcagcactttcgggccggaacagccgaggaaaatatctgcgccttcaatcacatcatcgagggtacgtttgccgtcatccactaccgcatatgcggctttggtttccgccatgtttggctcncggccctgatagataacgccttttgaatcgcaaaccacgatgttatgtttttgcagacccaacgctaccagcaggttcatacaggcgattgctgcagcacccgcgccggaaaccaccatacgcacgtcagagatgtttttctccaccacgcgcaancngttgaggatggcggcagtgctgataattgccgtgccgtgctgatcgtcgtggaataccggaatattcatccgctcgcgcagtttctgttcaatatagaaacattctggcgctttaatgtcttcgaggttgatgccgccgaaggtcggttcgagcgcagcgacgacttcaataaatttgtccgggtcgagttcatcaacttcaatgtcaaatacatcaatcccggcgaatttcttaaacagaacgcccttgccttccatcaccggtttgcctgccagcgcgccaatgttgcctaaccccagcaccgccgtaccgttagagatcaccgccaccaggttaccgcgcgcggtatatttgtaggcttttaacgggtctttttcgatttcaagacaaggtgcggcaacgcctggtgagtaggccagcgccagatcgcgctgcgttgccagaggcttggttggagaaacctggattttccctggaactggaaattcatggaaatcaagtgcactttgttttaactggtcatccatttggttgttcctttcacgtaacgttcacaaataaagtgtgtgggcaacagcccctgcccacaacgtggcgcacattattaccttgccggagtctacagactttgagcaagtccaaactctcaccattaatataatgttttggtaataatcctataacactgatgttacctgcttaatccagcaataccatgcctgtctgctatgcttttttgatgcgtttagcgaaatttctcagaagtgtgaattaacgcactcatctaacactttacttttcaaggagtatttcctatgaacgagttagacggcatcaaacagttcaccactgtcgtggcagacagcggcgatattgagtccattcgccattatcatccccaggatgccaccaccaatccttcgctgttactcaaggctgccggattatcacaatatgagcatttaatagacgatgctatcgcctggggtaaaaaaaatggcaagacccaggaacaacaggtggtcgcagcgtgtgacaaactggcggtcaatttcggtgctgaaatcctcaaaatcgtacccggtcgcgtgtcaacagaagttgatgcacgcctctcttttgataaagaaaagagtattgagaaggcgcgccatctggtggacttgtatcagcaacaaggcgttgagaaatcacgcattctgatcaaactggcttcgacctgggaaggaattcgcgcggcagaagagctggaaaaagaaggtattaactgcaacctgacgctgctgttttcttttgcacaggcgcgggcctgtgcagaagcgggcgtttttctgatttcgccgtttgtcgggcgtatttatgactggtatcaggcacgcaagccgatggacccgtatgtggtggaagaagatccgggcgttaaatcggtgcgcaatatctacgactactataagcaacaccactatgaaaccattgtgatgggcgcgagcttccgtcgcaccgaacaaatcctcgccttaaccggctgcgatcgactgactatcgcaccgaatttgctgaaggagctgcaggaaaaagtttcgccagtggtacgtaaattaatcccaccttctcagacgttcccacgcccagctcccatgagcgaagcggagttccgttgggagcacaatcaggatgcgatggcggtagaaaaactgtctgaaggcattcgtctgttcgccgttgatcaacgcaaactggaagatcttcttgccgccaaactataaaccagccacggagtgttatatgtcccgaaaagaccttgccaatgcgattcgcgcactcagtatggatgcggtacaaaaagccaattctggtcatcccggcnnnccgatgggcatggctgatattgccgaagtgctgtggaacgattttcttaaacataaccctaccgacccaacctggtatgatcgcgaccgctttattctttccaacggtcacgcgtcgatgctgctctacagtttgctgcatctaaccggttacgacctgccgctggaagagctgaagaactttcgtcaactgcattcgaaaacccctggccacccggaaatcggctatacgcccggagttgaaaccaccaccggtcntcttggacaaggtttggcgaacgccgtcgggctggcgatagcggaacgtacactggcggngcagtttaaccagccggatcatgaaattgtcgatcacttcacctatgtgtttatgggcgacggctgcctgatggaaggtatttcccacgaagtctgttcgctggcgggcacgctgggactgggcaagctgattggtttttacgatcacaacggtatttcgattgacggagaaaccgaaggctggtttaccgacgatacggcaaaacgttttgaagcctatcactggcatgtgatccatgaaatcgacggtcacgatccgcaggcggtgaaggaagcgatccttgaagcgcaaagcgtgaaagataagccgtcgctgattatctgccgtacggtgattggctttggttcgccgaataaagcaggtaaggaagaggcgcacggcgcaccgctgggggaagaagaagtggcgctggcacggcaaaaactgggctggcaccatccgccatttgagatccctaaagatatttatcacgcctgggatgcccgcgaaaaaggcgaaaaagcgcagcagagctggaatgagaagtttgccgcctataaaaaggctcatccgcaactggcagaagagtttacccgtcggatgagcggtggtttaccgaaggactgggagaaaacgactcagaaatatatcaatgagttgcaggcgaatccggcgaaaatcgctacccgtaaggcttcgcaaaatacgcttaacgcttacgggccgatgctaccggagctgctcggcggttcggcggatctggctcccagcaacctgaccatctggaaaggttctgtttcgctgaaggaagatccggcgggcaactacattcactacggggtgcgtgaatttggcatgaccgctatcgccaacggcattgcgcaccacggcggctttgtgccgtataccgcaacgttcctgatgtttgttgaatacgcccgtaacgccgcgcggatggcggcactgatgaaagcgcggcagattatggtttatacccacgactcaattggtctgggcgaagatggtccgacgcaccaggctgttgagcaactggccagcctgcgcttaacgccaaatttcagcacctggcgaccgtgcgatcaggtggaagcggcggtgggctggaagctggcggttgagcgccacaacggaccgacggcactgattctctccaggcagaatctggcccaggtggaacgtacgccggatcaggttaaagagattgctcgtggcggttatgtgctgaaagacagcggcggtaagccagatattattttgattgccaccggttcagagatggaaatcaccctgcaagcggcggagaaattagcgggagaaggtcgcaatgttcgcgtggtttccctgccctcgaccgatattttcgacgcccaggatgaggaatatcgggagtcggtgttgccttctaacgttgcggctcgcgtggcggtggaagcaggtattgccgattactggtacaagtatgttggtctgaaaggggcaattgtcgggatgacgggttatggggaatctgctccggcggataagctgttcccgttctttggctttaccgccgagaatattgtggcaaaagcgcataaggtgctgggagtaaaaggtgcctgatggtgatcgccggatgctgattgccggatgcgacgctgacgcgtcttatccggcctacagcgtcttatccggcctacatgtcccgccattttgtttaacgggtgatccacaacgtgggccaggcgtctggcccatgccagttatcgcaggtgggttctgcggcgtaacgcaccaggcgaaaacgctgaccgtcaaagcgccagcgcgcctgaatgccacaatcgcttaatccgcgccctttcgctaaggtcaccagttcacgcgatttctcatcaaatgttgcgttcatcagttccagttcattcgtctcctgaccgttgttgaacggcaaacgcagccggaccgggcgcgaggccagcggctttttacgcgacacaatccatgccaaatcaatggtgttataggcccctgcctcacagctaatcatcatcagcgctttatcatcagtcagcgcagtgacattcacctcacgacgcaatggatcaagcgagcagcgcagaccattcatccgccagtttccataatccagcaaatcgttgcgttcttcgagtgagagtggcgtcggcgttgggttaaccaccacgacctctttcagcgcaggcgcgggcggtacgctgagcggcggttcgtcccctttcttgatccacgcggtttcactgccaacgcgcttttgctgagcatcaataaacaacaacgccgcttttaagtcactcagagaaatggtctgattgccgtcgcgtaaggtgatcgccttcccttcctgaatcatctgcaaaaacgcggtgatggttgccgtatcatcggttactaataaccatggtgaaatccgccacttgtcaccacttaacgccaacggctcgccatctaacagcagccgtggcgcaatttccccttcagacgcatccggcgacttcaacccgccgcgctcaatacgtaaaacggcatcggtatgcgccccggcgctgcggctcagggtcatcaccagtccattatgatcgcccgtattacgcgccacgcagaagttttggttattacaggtgacctgccagtcggaaaacgcccgttgcgctggtgccgcccacaccaaagacgtcggcaacaaagcgaaaaaaaagagaaggaaaatgcgatagcgcatggacggtacgaccccagaagttcaaacaaacagcacaagtcgtatcttcgttgcgcaggtagcgcggctcaatcggatttgtcggattgagccaagaataaacaacgaaatattattgttatttttcagtccattaaatgtgacatttgcaaatagttaagcaataacaccgtcttaccgtcacgtatctcgccggttttgatcatctccagcgcctggctgaacggcagctcgagcacttcaatatcttcatcttcgacaccgccaccggcgttagcgcgctgattgtcactgtattcggcgataaaaaagtggattagctcagtcacaccgcctggcgacatatacagttcaaataatttgcgcacttcgcccacttcatagcccgtctcttcaatcgcttctttgcgaatgcacacttccggttcgtcgttatccagcagcccggcgcaggtttcaatcagctgcccgctttcattgccattaacccaggtagcgacacggaactgacgaatcagaaccacggtctttttcttcgcgttgtacaggaggatcgtcgcaccattaccgcgatcgtaaacttcacgtttatggcggataacttcgccatctttgcgcgtgagatcgtaagtaatgttgtgcagggtgaaatagttatcggagagaattttgtttttaatgagggtgatttgttgcgtcataccgactccacagcgcgaaatgaacaattatattacgctgtgaagtcgggtttgtctgcgcaggctatcagtgagatttgactgattttacccccagccagtcaataatcccctgtgccgcatgacgtccttctgccattgcggtaaccaccagatccgcaccacgcacggcgtcgccaccggcgaagattttcggattggtggtctggtaacggtactggctttccacatccgcgatgatgcggccccatttgtctaccgttacaccgtgcgactccagccacggcatcccgtgcggattgaagccaaacgccataatcaccgcgtcggctggcatgacaaattcactgccttccaccggcactggacgccgacgcccctgggcatccggctcgccaagacgcgtgcgcaggaaacgaatcccgcagacgtgaccttgttcattcagctcaagcgccaccggctggacgttaaattcgaagttggccccctcttcgcgggcgttcttcacntctttcttcgagcctggcatgttagcttcatcacgacgataagcgcaggtgacgttactcgcgccgtggcgcagcgcagtacgcacacagtccatcgcggtgtcgccgccgcccagtaccacgacgttaagtccggcggtattgataaacggctcttccggtagctcttcgagccccatcacctgtttagtgttggcgatgaggaacggcagcgcgtcataaacgcccggcgcatcttcattgggtaaacccgctttcatggaacggtaagtgcctacgccaacgaagaccgcgtcgtattgttccaaaagcgaatccaaagagacatctttacccacttcacaattgagttcgaagtgaatccccatcgcgctgaagatttcccgacgacgtgccagcagggatttatccagtttgaaagaaggaatgccgaaagtgagcaagccaccgatttctggatggcgatcgtacaccgtcaccgccacgccattgcggatcagaacatccgcacaggccagccctgccggacctgcaccgataatcgccacccgcttgtccactttggtgacatggcttaagtcaggacgccaacctttcgccaacgcctgatctgaaatgtagcgttcaatgttgccgatagttaccgcaccgtgctcatcgcgaatagtacaggcaccttcacacaaacggtcttgcggacaaacgcgtccggtaatttccggcagggtgttggtcaggtgagaaagctcgacggcggcgtcgatgtttccggctttcaccagttcaatccactgcggtatatggttatgcagcgggcaggtccattcacaaacgctgtgctcgccgcatttaaggcagcgcgaggcttcccgttgtgcctgatcggcacggaatggcagataaatttcatcaaaaccggttttgcgcgcttcaatcgccagtttatccggctcgccacgcgcgggcgttgcctgcatttgttcgactttactcattaccggcatttcttgtgcagcggtactggcatgccacggttgatgttcctgacgtgcggtacgcaagcggcgggatttcgccatgcctgagagtgcggcgtcagtgaccagctgcagcgcgtccgccgggcaattctcgacacaggcaggaccgttttcgcgccctgcacaaaggtcgcatttatgcgccgtggctttaactttgcccgctgcgacgggtgtcaggacgatttgcatcgtaccaaacggacaggccaccacgcaggatttacagccaatacacttttgctgattgacctgaatgctgtcatcaacgtggctgattgcgccattagggcagctacgggcgcagggcgcatcttcacaatggtgacaggtcactgcactacgttgctgctgatgtttgataaccgtaattcggggatgaaaatggtgttggctcaggacatgttgctcatcattgtgagccatgacacaagcgatttcacaagcatgacaacccagacattgctgactgttggccataataaaacgattcataacgaccttcttttttggttgtaaaaaccttattctttatatgagtgttgttattacccgacttacaggggaatcggcaatgttcatgtgcccagaataagtaactatttcgctataaactgtggcagatcaaataatcccatcactaactaaattgcgtttcagcgaactggaacattaatgattttttgtggagaagacgcgtgtgattgttaaacgacccgtctcggccagt

SEQ ID NO: 1362 - DNA, 6723 bp, Escherichia coli
  Strain O55:H7
  modified_base (1321)..(1321): a, c, g or t
  modified_base (2627)..(2629): a, c, g or t
  modified_base (2631)..(2633): a, c, g or t
  modified_base (3587)..(3587): a, c, g or t
  modified_base (5695)..(5695): a, c, g or t
cgggcctttttttacattgtgctgctgtcgattctttccacgggtatcgctctgctaactctggcgagcagtttgcgcgacgctgaggctatcaatattgccggatcgctgcgtatgcagagttaccgcctgggctacgacttgcaaagtggcagtccacaactcaatgcacatcgccagctgtttcagcaggcactgcattcaccggtattaaccaacctcaacgtctggtatgtgccagaagcagtaaaaactcgctatgcgcatctgaatgccaactggctggagatgaataatcggctcagcaagggcgatttgccgtggtatcaggccaatattaataattatgttaatcagatagacctgttcgtgctggctttacagcactacgctgaacgcaaaatgctgctggtggtggcgatttccctggctggcggtatcggtattttcacgctggtcttttttactttgggccgcatacgccatcaggtggttgccccgctgaatcagctggttaccgccagtcagcgtattgaacacggacagttcgactcgccaccgctggataccagcctgccgaatgagcttggtctacttgcaaaaacctttaaccagatgtcgagcgagctgcataaattgtaccgttcgctggaggcgtcagtagaagaaaagacccgcgatctccacgaggccaagcgtcgtctggaggtgttgtatcaatgttcgcaggcgctgaacaccagccagattgatgtgcattgtttccgccatattttgcagattgttcgcgacaatgaagcggctgaatatctggagttaaatgtcggtgaaaactggcggattagcgaagggcaaccaaacccggaattgccgatgcagattttaccggtgacaatgcaagagacggtttacggcgaactgcactggcaaaatagtcacgtttcatcatcagaaccgctgcttaacagcgtttcgtcgatgctgggacgcggtttgtactttaatcaggcgcagaagcattttcagcagttattgttgatggaagaacgtgcaaccatcgcccgcgaattgcacgactcgctggctcaggtactttcttacttacgtatccagttgacgttacttaagcgttcgataccggaagataacgccaccgcacaaagtatcatggccgatttttcccaggcgttgaatgatgcttatcggcagttacgcgagctgttgactacttttcgcctgacgctgcagcaggcggatctcccctccgcgttgagggaaatgctggatacgttacaaaatcaaaccagcgccaaactgaccntcgactgccgtctgccaaccctggcactggatgcgcaaatgcaggtgcatttgttgcaaattattcgcgaagcggtgctgaatgcgatgaagcacgccaacgccagcgaaatcgccgtcagttgcgtcaccgcgccggacggcaatcacacggtttatatccgtgataacgggattggtatcggtgaaccgaaagaacccgaaggtcattatggtctgaatatcatgcgcgaacgcgcggaacggctaggtgggacgctgactttttcacaaccttccggcggcggcacgttagtgagtattagctttcgctctgcggagggtgaggaaagtcagttgatgtaatgcctcctactgaccaaagaatacttgcagttaaggttcagtataaaagggcatgataatttacattaactcctttttttctccacgattggctcgtaccttgccgctacagtgaagcaagtcaagcctacaacgatacgcagaaacacgaggtcctcttttaatggcgaatttctttattgatcgccccatttttgcctgggtgctggcaatcctgttgtgtctgacaggtaccctggcgattttttcattgcccgttgaacaataccccgatctcgcgccaccgaatgtgcgagtgaccgctaactatcccggcgcatcggcccagacgctggaaaacaccgtgacccaggttatcgagcaaaatatgaccggcctcgataatctcatgtatatgtcatctcagagcagtggcaccggtcaggcatctgtcactttaagttttaaagcaggcaccgatccggacgaagccgtgcagcaagtacaaaaccagctgcaatcagccatgcgaaagttaccgcaggcggtgcaaaatcagggcgtgactgtgcgtaaaaccggcgataccaacattctgaccattgccttcgtctctaccgatggttcgatggataaacaggatattgctgattatgttgccagtaatattcaggacccgttaagccgcgtaaatggcgtcggggatatcgatgcctatggttcgcaatattccatgcgtatctggctggacccggcgaaactcaacagtttccagatgacagctaaagatgtcactgatgccattgagtcacagaacgcgcagattgcggttgggcaacttggtggtacaccttccgtcgataagcaggcgctcaacgccaccattaacgcccagtcactgctgcaaacaccagaacagttccgcgatatcaccttgcgggtgaatcaggacggctcagaagtaaggctcggcgatgtcgccnnngnnnaaatgggggcggagaaatacgattatcttagccgcttcaatggtaagccagcctccgggttgggggtaaaactggcctccggcgcgaacgaaatggcgacagcggagctggtgctcaatcgtctcgacgagctggcgcagtatttcccgcacggactggaatacaaggtggcgtatgaaaccacctcgtttgttaaagcctccattgaagacgtggtgaaaacgctgctggaagctatcgctctggttttcctcgttatgtatctgttcctgcaaaacttccgcgccacgctgatacccactatcgccgtgccggtggtgttgatgggaaccttctccgtactttacgccttcggttacagcgtcaacaccttaaccatgttcgcgatggtgctggcgatcggtctgctggtggatgacgccatcgtggtggtggaaaacgtcgaacgtattatgagtgaggaaggactcactcctcgcgaagccacgcgtaaatcgatggggcagatccagggggcactggtcgggattgcgatggtgctttcggcggtatttgtaccaatggccttcttcggcggcaccaccggtgccatctatcgccagttctctattaccattgttgcggcgatggtgctgtcagtactggtagcgatgatcctcactccggctctgtgtgccacactacttaagccactgaaaaaaggtgagcatcacgggcaaaaaggcttttttgcctggtttaaccagatgtttaaccgcaacgccgaacgctacgaaaaaggggtggcgaaaattctccaccgtagcctgcgctggattgtgatttatgtcctgctgcttggcggcatggtgttcctgttcctgcgtttgccgacgtcgttcttaccgctggaagaccgtggcatgtttactacctcggtacaattgcccagcggttcaacccaacaacagaccntgaaagtcgttgagcaaatcgagaaatattacttcacccatgaaaaagacaacatcatgtcggtgtttgccactgttggttctggccctgggggtaacgggcaaaacgtggcgcgaatgtttatccgcctgaaagactggagcgaacgcgacagtaagaccggcacctcgtttgccattatcgagcgtgcaacaaaggcgtttaaccaaattaaagaagctcgcgttatcgccagcagcccgccagcaattagcggtcttggtagttctgcaggttttgatatggagttgcaggaccacgctggagcaggtcacgatgcgctgatggcagcacgtaaccagttgctggcgctggcggcggaaaacccggagctaacccgtgtgcgccataacggcctcgatgacagtccgcagttgcagattgatatcgaccagcgtaaagctcaggcgctgggcgttgctatcgacgatattaacgacacactgcaaaccgcctggggttcgagctatgtgaatgactttatggatcgcggtcgcgtgaagaaagtctatgtgcaggcagctgcgccgtatcgcatgctgccagatgacatcaatctctggtatgtccgaaataaagatggcggcatggtgcccttctctgctttcgcgacctcacgctgggagacaggctcgccgcgtctggaacgctataacggttattctgcggttgaaattgttggggaagccgcaccgggggtcagtaccggtacggcgatggatattatggaatcgttagtgaagcagctaccaaacggctttggtctggagtggacggcgatgtcgtatcaggagcggctttccggcgcgcaggctccggcgctgtacgccatttccttgctggtggtattcctgtgtctggctgcattgtatgaaagctggtcggtaccgttctcggtaatgctggtcgtgccgctgggggtaatcggcgcgctgctggcaacctggatgcgcgggctggaaaacgacgtttacttccaggtgggcctgttaacggtcattggtttatcggcgaaaaacgccatcctgatcgtcgagtttgctaacgagatgaaccaaaaaggccacgacctgtttgaagcgacgctccacgcctgccgtcagcgtttacgcccgattctgatgacctcgctggcatttatcttcggcgtattgccaatggcaaccagcacgggtgccggttccggtggtcagcatgcggtgggtactggcgtaatgggcgggatgatttcagccactattctggctatttacttcgtgccgctgttctttgtgctggtgcgccgccgcttcycgctgaagccgcgcccggaataagcaataaaaaaggcgacatgccaatgtgtcgcctttttcaactttccgattaagaacctgctcagcgggttcttgctgtttgtactttgtctcaggaattacttacgaagcataacttcaataaagtctttccagttccccagttcacgttcaatcataacaacctctcttataattatgggtattctacggaaacaatataccgtggtgaagctaatttactcgattgctgcgatgactacctccgggggacaaaccttatgtaaatactatggtcctgcagtgatgatttgtatgtgatacacagcaacatttcgagatattcatacggcatctaatactgatttaattctggttaaaatacagacagataacaagatgaatattcttaatgtttacgttaaaaatgtttaatattatttaatagttgttaatttgaatacttcgataatgttatatttcctgataatcatttgcaggcaaaatgttttcactcttaaatgagtatttattctcataaatcgaaaaaggattcattatggttacactttacggcatcaaaaattgtgacaccattaaaaaggctcgccgttggctggaagccaataacatcgactatcgttttcatgattaccgcgtcgatgggctggacagcgaattattgaacggttttatcaacgaattaggctgggaagcgttactcaacacccgtggtacaacctggcgtaaactggacgaaaccacccgcaatanaatcaccgatgcggcctctgcggcggcattaatgactgaaatgcctgcaattatcaaacgtccattgctctgcgcgcctggtaagcctatgctgctgggtttcagtgattccagttatcagcaatttttccatgaggtgtagtctatgtcgtgcccggttattgagctgacacaacagcttattcgccgcccttccctgagtcctgatgacgcaggatgccaggctttgttgattgaacgtttgcaggcgatcggttttaccgttgaacgcatggactttgccgatacgcagaatttttgggcatggcgtgggcaaggtgaaacattggcctttgccgggcataccgacgtggtgccgcctggcgacgccgatcgttggatcaatccgccgtttgaaccaaccattcgtgacggcatgttattcgggcgcggtgcggcagatatgaaaggctcgctggcggcgatggtggtagctgcagaacgttttgtcgcacaacatcccaaccatacagggcgactggcatttctgatcacctctgatgaagaagccagtgcccacaatggtacggtaaaagccgtcgaagcgttaatggcacgtaatgagcgtctcgattactgcctggtcggcgaaccgtcgagtatcgaagtggtaggtgatgtggtgaaaaatggtcgtcgtggatcgttaacctgcaacctaaccattcatggcgttcaggggcatgttgcctacccacatctggctgacaatccggtacatcgcgcagcacctttccttaatgaattagtggctattgagtgggatcagggcaatgaattcttcccggcgaccagtatgcagattgccaatattcaggcgggaacgggcagtaacaacgttattccgggtgaactgtttgtgcagtttaacttccgcttcagcaccgaactgactgatgagatgatcaaagcgcaggtgcttgccctgcttgaaaaacatcaactgcgctatacggtggattggtggctttccgggcagccatttttga

SEQ ID NO: 1363 - DNA, 11431 bp, Escherichia coli
  Strain O55:H7
  modified_base (93)..(93): a, c, g or t
  modified_base (291)..(291): a, c, g or t
  modified_base (1634)..(1634): a, c, g or t
  modified_base (1636)..(1636): a, c, g or t
  modified_base (2663)..(2663): a, c, g or t
  modified_base (5396)..(5396): a, c, g or t
  modified_base (5499)..(5499): a, c, g or t
  modified_base (6609)..(6609): a, c, g or t
  modified_base (7205)..(7205): a, c, g or t
  modified_base (9612)..(9612): a, c, g or t
  modified_base (9660)..(9660): a, c, g or t
  modified_base (9665)..(9665): a, c, g or t
  modified_base (10924)..(10924): a, c, g or t
  modified_base (10935)..(10935): a, c, g or t
gcggtaaactggtggatgcggtcgttaacgcggttgagcactataatgaaattaaaccgcagctactgaccacaggcggaacgtccgacgggngctttattgcccgcatgggggcgcaggtggtggaactcgggccggtcaatgccactattcataaaattaatgaatgtgtgaacgctgccgacctgcagctacttgcccgtatgtatcaacgtatcatggaacagctcgtcgcgtgatgagtggttctgcaagaggaaataagcatggactggctggctaaatattggnggattctggtgattgtctttttggtaggcgtcctgctgaacgtgattaaagatctcaagcgcgtcgaccataagaaatttctcgccaacaagccggagcttcccccgcatcgtgatttcaacgataagtgggacgatgacgacgactggccgaaaaaggatcaaccgaagaagtaagctaagtggccggataaggcgttaacgccgcatccggccatgatgcctgatacggtcttatcaggcctacccggctattattacatcatttcaatcacatcatcatcgccaggcttaccgccgcttagcgcttcgtcgaaataatgtttcggaatggtataacgcaagtgatccagggcaaattgcatactgcgattgtcgatcgcatggcctaaatcctccacgatatccagcgtcacgtcaccaccggcactgattaacgcttcctgcgccgcaactgcatgcgccagatcgataaccggatcttcaccgccatgaatcaagtgaattgtcgtggctgtagacgcggtttccggcaggctcgcatagcgtccgttaaaagcaatgacgcgtgaagcaaggcccggttcggctttaatgctctccagcgccataatcgcgccttgagagaaaccgattagcgccgtggcgttagcccctactccgctctgtttctgccagtagcgcaccgtttcaataaacgtcggcatgatggcatccacacgcgcctggcgattatcttccgtaataccctgcaccgaaaaccactgacgccccgccggattaccgctcggctccgcgccaccgacactcaccaccagcgcatccgggaacaacggtgcaaaccagctacctatttcccccattgccaccgggttatccccgacaccgtggaaaagcagtaacaactgttgcgcaggtttatccgggctttgaacaacaaaatggtcatgtttcatggcgaactccttaactgatgtcattaattttacgccgctgactcacaatgaccatgggagaaaattgaaggagtcagtgaaaaaattgccattgcgttatgcgatcgcgcagacgctcagtgcgaacatcattaagtgcgaacagcgcctgtgcggcctcttcccgctgacggaccagtaacatcttgcggcctgaaagtttaagtgtggtacataactgcgcgtcgctgacgtttttctgtaaacgcccacgcagcgccggtaatgccagttcactggtttgtagcagacgcaataagcaacctaacgatgttaatagcggacgatgagcgaaagcaaaaccggccagttcaagccagtcgtcgtcagaaaggacggcattgtttantngatcaacagggagtgtttcgccattccactgcgcgagagcttgcgcatcgcgacgtaaacggtaatgctcacgttcagccagctgtttacccgcatcactcatcggtaacagcgccatcgccgtatagcaaccgctgctggcttcacgatgattacccattcgcaccagcacaaaaccgcagcgttgccagaaacgccataactccccggtgtaaccaaaactcaccgaaagatagtcgaggccaggcctatattgcaaagcgctggcaatgagctgttgcccaacgccttcgcgctgacgcgccggatgaactgctatccggctgacccgccgtccacgcaatgtcgccgccagtggattgctgccgtgcgccgccagcgactgggccaccagattaccccgcgggcgacgaaaacctgcccataccgcctgactgagttcttgagataatccaccctcatccaccagccacagcgctccggcaatctcgttttcgccagccgcctgtaaaaaatgttgccctggtgcatccatcatgcggcgtaaatccagcggcgaagtccggtagtgcgcaccagacaataactgataaacctttaacggcgtttctggctcgcttcgccataacgtttgttcaaatgcggaaatgacgatattgccttgtggtgtatgggtgaagttttcatcgttaaaaaccagtgcctcactaaccattttttccagcgggcatccctgtgcccagcggatcggctgttgcagttcaaaacggtgtaaatgcggaaagcgagcgcaaaatttcagcaaaaaaccacgtccggtaccttcgtagccctgcaccgtagtggttaacaacgttcgaggaaaacgcgataccagttgatgcaacaacggcgcaggtatggctgcggcttcatcgaccaccagccagtcggcttgctcatcgctggctaacaaggcatccggcgcaataaagcgaaacttctcgcccgcaaattgtgccagtacatccgttgccgcttttgcggncgcagtgataatcgcactacccgcaatacgagaaatgagttgccctgccagcgccgatttaccgcgcccacgcgcagcagttaccgctgccacgcccgacggcatggtcagtagctgctgtaagatttgctgttgttctggttgtggtgcgccggtcgcggggtgccagtcagtacggggagtaaaatgcgccaacgagaacggctggttttgccgccagaagatagcgtcgttatccgccgtaagtacgcgtttgaaatgctggacaaaatgcggcgtcgcaatagggtcagggcaatcactccagcgcagcgagtcggcatcaggttggttttcccactcttcccatacagggagtaacaaaaccagccagcttcccgctttcaacgttccgctaagtgcggcaaaggcagcggcatcaaagccgtggcgggcgtcgaataccgcatgccggaactcgcgcccaagtaaagtttgtagtgccgagggagaacagtggttttcagcatctggctgcggcgaaatccacagccagtcgccaggtaaggcatcacgtaacttaagcgcatgatcaaaacaccaaccctcttccccgctcaacaccagcaagcggcggatcccttcacgtttcatttgcgctgttaatgtgtgaagcgcagtcagttcagccatccctgccccggaagttaaatgcttttaccaaaagtattgcattgtgccggatcgccgctgtcgaaaccacgtttaaaccagctgtagcgttgctgagaagtgccatgagtgaaactgtctggtactactcgcccctgactttgctgttgtaaacggtcatcgccgatggcctgcgccgcgttcagcgcctcttccagatcgccggtttccagaacgccttgctgctgcatgctatgcccccagacaccggcaaaacagtcggcctggagttccatacgcacagataagcggttcacttccgcctgcgtcgcgttttgttgcagttgacgaactttcggctcgatgcctaacagtttctgcacatgatgaccgacttcatgggcgataacgtacccctgggcaaaatcgccatccgcgccaagtttgtctttcatgtcatcatagaaggagagatcgatataaaccgtaccatccgccgggcaatagaacggccccattatggactggcccgccccgcatccggtacgcgtcattccacggtacatgaccagcttcggttgctgataggtcttacccatcttctcgaactgttgtccccaggtgtcttccgtggttgccagaatcaccgaggtgaattttgcggcttcgtcttcatttgggctaattgaccgcgttgattgctgttgagaaaccggctgcccggtcatcaacccggttaaatcaacgccatagtagcctgcaaccagcacgactatcagtaaaatcaacccgcctttaccgctcggcagacggaaaccgggaccgcccattgacggaccgccggagctattgcgcctgtcttcaacattgtcactttcacgtcgcccttgccaacgcatagatacctcaacaatatattcattatagaaatgatcgtaggtggttcagaggaagattaccacaggaaaacgggatgaaatggcggaggaatgagcgttcaatgcacatcttacgagaatggttgtcttgccgtgccagcagcacggcaagatgatgaacagaaaaatcagtccagctgtacacccaggcggcgggcgacggcttcataggcctcgatcaggccaccgaggctctggcggaaacggtctttgtccattttctccagcgtttctttgtcccacaggcggctaccgtccggggagaactcatcgcccagtaccacttcacctttgtacagaccaaactccagcttgaagtcgaccagaatcagaccagcatcatcgaacagttttttcagcacgtcgttcgctttgtaggtcagctctttcatgcgtgccaggttctctttgcttacccagccaaaggtttcgcagtaagattcgttgaccatcggatcgtgcatggcgtcgtttttcaggaacagatcgaacagcggcgggttcagctcaataccttcttcgattccaagacgtttcaccagagagccagcagcacggttacgcacgacacactcaaccggcaccatatccagctttttcaccagacattcggtatcggagagcagacgctccatttgagtcgggatacccgcttcagccagtttgctcataatgaagtagttgaacttgttgttcaccatacctttgcgatcaaactgctcaatgcgcgcgccatcccctgctgacgtatcattgcggaattcgagcaccaacaggtccgggttttccgtgctgtatacggttttcgctttaccacgatacaactcagcttgcttttgcatctttatcactcctgggtgtgaattaacgttttaaaatcttttgctgtctggtgtgccggatgttttgtcggatgcggcgtgaacgccttatccgaactacgtccgacaaacaaatttcgtgcgaattaccgctaaaatcgcgttttcctgccgacgcacacgtttgcgtatcatatcagaaaaaagggccggatgattccagccctgtatttttacttgctaaacgcagcctggaagacagctaccagcgcgtcgttctgactctgagtcagagtatgacctttcggatcgatgaactgtangctgctgcggttatctaaatcgccaacctgcagtttatagtcaccagatgccaggcctggatcgctcgcgcccagttcctgccagtcgctgtcagacagcggnttataagttacggccatgttgccctgcgaacgggtgctgtcggtcactttcatgcccactttttccagcgccgctggcagacgttgccaaaccacattgaacggcccgcgtacgaccagcattggtaaaccggtgtcatcagctgcactttgtacgtccatagtggtggaggcacgattttgcgcagcgttcgcggcgtcagtggcagatttatccagaccagcggaaataacgttcatcatctccgtgctgtaacgctgcatggaagccgcgtctgcaaccggtttgcccgcctgttccaggttcagcagtttaaccgtaaccgcctgctgataaccctgcggcttaacagagatttgataacgaccacgatactgctcgtcttcgtccagacggttccattgtacccaatcggtggtcagtgtctgaccagcatcatcacgttgggtgatggtgtagtttttcgcctgcagcacgctaaccacctgcggccacagagtattgccacgaccattttccaccagcaatgaagcggtatcgcccgtgaactgggtacgcgcgccagaaaccagtgccagcggctgggctggtggacgaatgtccagcgccttaccgacagcactactaccgttggtcaccgggattgcataatcaccggaggtcaccggcaaaatcattccagccggggcatgaagctccgcaagcggtgccgcttccaggtaggcttcatcaccactgacctgacgcttatagcgtgagtcagaactacaggcagcgagtaataaaacaagcgaaacacccgcaacctttgccaggcgcgacttttgaacagagtaagccatcaaatctccctaaactttacagcaaaccggcatgcttaagcgccgctctgaccgtctcacgaccactgtcggtgattggtgtcattggcaggcgcagcgtatcggtcgccacaagacccagttccttacatgcccatttcaccgggattggattgggttcgacaaatagtttgttgtgtaatggcatcagacgctgattaataacgcgtgcctcggcaaaatgcccttctgctgccagtttgcacatctgggccatatcacgcgctgngacgttagccgtaacggaaataaccccatgaccgcctaattgcatgaagtccagcgcgctcgcatcatcgccgctcagcagaacaaaatcatctgaaaccagctctttgatctggtttacacgcgttaagttccctgttgcctctttgattccgataatattttttactttcgccagacggcccaccgtttccgggagcagatcgcagccagtacgggacggcacattatacagaatttgcggcaggtcagtatgctcagcgatggctttgaaatgctgatacaaaccttcttgcgacggacgattgtagtaaggggttaccgtcaggcagccgacgataccactgtcattgaagcgctgcgtcaggctaatggcttccgcagtagcgttagcaccggtcccggcaatcaccggaatgcgcccgtcagccagctccagcgtcatcatcaccacatcagcatgttcgtcatgatttaaggtagcggactcgccagtggtgccaacagaaacgatcgccgaagtaccgctggcgacatgataatcaatcagttttttcaagctagcccgacagacattacctttttcatccatcggantaacaatcgcgacaatacttcccgtgaacatgggccatcctctgtgcaaacaagtgtctcaatggtacgtttggtatggcattaaaagcaagcagacagaaccgttctgattgttgtatgcatgttttttttatgctttccttaagaacaactcaccccttaaaggaataaccagtttgacactgtcatcgcaacattatctggtgatcactgcgttgggtgccgatcgccctggaattgtgaacaccatcacccgtcatgtcagtagttgcggctgtaatattgaagacagtcgcctggcgatgctgggagaagagttcacgtttatcatgctgctttccggttcatggaatgccattactctgattgaatcaacgttaccgttgaaaggtgccgaactggatcttttaatcgtgatgaagcgcacgacggcgcgtccgcgtccgccaatgccagcatctgtctgggttcaggtcgatgtggcagactccccgcatttaattgaacgcttcacagcacttttcgacgcgcatcatatgaacattgcggagctggtgtcgcgcacacaacctgctgaaaatgaacgggctgcgcagttgcatattcagattactgcccacagccccgcatctgcggacgcagcaaatattgagcaagcgttcaaagccctatgtacagaactcaatgcacaaggcagtattaacgtcgtcaattattcccaacatgatgaacaggatggagttaagtaatgaatccactgaaagccggtgatatcgcaccgaaatttagcttgccggatcaagacggagaacaagttaatttgaccgacttccagggacagcgtgttctggtttatttctacccgaaagccatgacccccggctgtaccgtacaggcctgcggcttacgcgataacatggatgagttgaaaaaagcgggcgttgatgtgctgggtatcagcaccgataaacccgaaaaactctcccgttttgcggaaaaagagctgcttaactttacgctcctgtctgatgaggaccaccaggtgtgcgagcaattcggcgtctggggggaaaagtccttcatgggcaaaacctacgatggtattcatcgcatcagcttcctgattgacgctgatggcaaaatcgaacatgtctttgacgatttcaaaaccagcaatcaccacgacgttgtgctgaactggctgaaagaacacgcctgattactttgctccattccgtgctggctgcgcttgcggtcagcacacctcacttatcgtgatcaagatcacattctcactttcccctgcgacacgggtgtcgaatccattttttgctgaacgttaatgaccatcatttttgtaccgttcagaattcagttaattcataacttattgaatatattaaattaatcatactggcatcctttatgcattatgaaatgcaatgtttcatatcattttcaaggagccgacatgaaccgctttgtggtggccgaaccactgtggtgtacaggatgtaatacctgtctcgctgcctgttcggacgtgcataaaacgcaaggtttacagcaacacccgcgcctggccctggcgaagacgtcaacactcactgcccctgtcgtgtgtcatcactgtgaggaagccccttgcgtgcaggtctgcccggtcaatgccatctcccagagggatgatgcgatccaactcaacgaaagcctctgtattggctgcaagctttgcgccgtggtctgcccatttggcgcaatcagcgcttcaggaagccgtccggtgaatgcccctgcgcaatatgtttttcaggctgaaggctcactcaaagacggcgaagaaaacgcgccaacacaacatgctttgctgcgctgggaaccgggtgtccagaccgtcgcggtgaaatgcgacctgtgtgatttcttgccagaaggtcctgcctgcgttcgcgcttgcccgaatcaggcgttacggctgatcaccgacgatagcctgcaacgtcagatgaaagaaaaacagcgccttgccgcaagctggtttgccaatggcagggaggatcccctttccctcactcaggagcaacgctaatggatgccctgcaattattaacctggtcgctgatcctctatctgtttgccagtctggcttcgctgtttttactcggtctggacagactggctattaagctttccggcatcacatcgctggtgggcggcgtgattggcatcatcagcggaattacgcaattacatgaaggcgtaactttagtcgcccgttttgccaccccttttgactttgccgatttaaccctgcgaatggatagcctctcggcatttatggtgctggttatctccttgctggtggtggtttgttcgctctattcattgacttatatgcgcgaatacnagggcaaaggcgcggcggcgatgggcttctttatgaatattttcatcncatcnatggttgccctgctggtgatggacaacgctttttggttcatcgtgctgtttgaaatgatgtcgctgtcttcctggtttctggtcattgccaggcaggataaaacgtcgatcaacgctggcatgctctacttttttatcgcccacgccggatcggtgctgattatgatcgccttcttgctgatggggcgcgaaagcggcagcctagattttgccagtttccgcacgctttcactttctccggggctggcgtcggcggtgttcctgctggcctttttcggttttggcgcgaaagccgggatgatgccgttgcacagctggttgccgcgcgctcaccctgccgcaccatcgcacgcttcggcgttgatgtctggcgtaatggtcaaaatcggtattttcggcatcctgaaagtggcgatggttctgctggcgcaaacgggtttgccgctgtggtggggcattctggtgatggcgatcggcgcaatctccgcgctcctgggcgtgctgtatacgctggcggaacaggatatcaaacggctgctggcctggagtaccgtcgaaaacgtcggcattattttgctggcagtcggtgtggcgatggtcggtctgtcactgcacgacccgctgctcaccgtggttggactgctcggcgcactgtttcatctgctcaaccatgcgctgttcaaagggctgctatttctcggcgcgggcgcgattatttcgcgtttgcatacccacgacatggaaaaaatgggggcactggcgaaacggatgccgtggacagccgcagcatgcctgattggttgcctcgcgatatcagcccttcctccgctgaatggttttatcagcgaatggtacacctggcagtcgctgttctcactaagtcgtgtggaagccgtagcgctacaacttgcgggtcctattgctatggtgatgctggcagtcactggtgggctggcagtaatgtgcttcgtcaaaatgtacggtattactttctgtggtgcgccgcgcagtacacacgctgaagaggcacaggaagtgccaaatacgatgatcgtcgccatgctactgctcgcggcactctgcgtattaattgcgcttagtgccagttggctggcaccgaagataatgcatattgcccatgcgtttaccaatacccctcccgtcactgtcgccagcggaatagcacttgtacccggcacgtttcatacacaggtcaccccctcattactgttgctgttactactggcgatgcctttgcngcctggccttnactggctgtggtgtcgttcgcgccgcgcagcgtttcgtcgcacaggagatgcctgggcatgcggctacggctgggaaaatgcgatggccccgtcaggcaatggcgtgatgcagccgctgcgtgtggtcttctctgcgctatttcgtctacgacaacagctcgaccctacgctgaggctaaataaaggtcttgcgcacgtcaccgccagggctcagagcacagaacccttctgggatgagcgggtgatccgccccatcgtgagcgccacccaacggctggccaaagaaatacagcatctgcaaagcggcgactttcgtctctattgcctgtatgtggtcgccgcactggttgtgctgctaatcgctattgccgtctaaggaaatcaccatgagacaaactctttgcgacggatatctggtcatttttgcgttagcacaggccgtgattctgctgatgctaaccccgctttttacgggtatttcccggcagatacgcg

SEQ ID NO: 1364 - DNA, 9588 bp, Escherichia coli
  Strain O55:H7
  modified_base (184)..(187): a, c, g or t
  modified_base (2420)..(2420): a, c, g or t
  modified_base (3034)..(3034): a, c, g or t
  modified_base (4265)..(4265): a, c, g or t
  modified_base (4421)..(4421): a, c, g or t
  modified_base (6619)..(6622): a, c, g or t
  modified_base (7393)..(7393): a, c, g or t
actcccgccgcgggccggggatctggcaggattatcgcgatatccacaaactgtttaaacgccaggaagttgcgcctatatcttcaggtctgatgttccgcctgatgccgtgggtattaatcagcagcatgctggtgctggcgatggccctaccactatttattaccgtttccccttttgcggnnnncggcgatctgatcacccttatctatcttcttgccctgtttcgttttttctttgctctttccgggctggataccggaagcccgtttgcgggagtcggtgccagtcgcgagttgacgctcggcattctggtcgaaccaatgctcattctctcactgctggtattggcgctgatagcaggttccacgcatatcgagatgatcagcaatacgctggcaacgggctggaactcgccgctaaccaccgtactggcgttactggcctgtggttttgcctgcttcattgagatgggaaaaattccctttgatgttgctgaagcagaacaggaattacaggaaggcccgctgacagaatattccggtgccgggctggcgctggcgaaatgggggctggggctgaaacaggtcgtgatggcagcactgtttgtggccctgtttctgccctttgggtgcgcgcaagaactttctctcgcctgcctgctgacttcacttgtcgttacgctgctcaaggttttgctgatttttgtactggcctcaatcgcagaaaacacgctggcacgcgggcgttttttactcattcaccatgtgacctggcttggcttcagccttgctgcgcttgcatgagtcttctggttaaccggtctgtaaggagcactgacggaatatggaaaatcttgctctgacgacgttattgctgccttttatcggcgcactggtcgtttcgttttcgccacaacgtcgggccgccgaatggggggttttgttcgccgcgctgaccacgctgtgcatgttgtcgctgatctccgcgttttatcaggccgataaagttgccgtcacgttgacgttggtcaacgtgggggatgtggcattgtttggcctggtcattgatcgcgtgtgtacgctgattctgtttgtggtggtgtttctcggtttgctggtcacgatctactccacgggttatctgacggataaaaatcgcgaacacccgcataacggcacgaatcgttattacgcatttttgctggtgtttatcggcgcgatggcgggactggtactctcctcgacgctgctcggtcagttgttgttttttgaaattacgggcggctgctcctgggcgttgatcagttattatcagagcgataaagcgcagcgttcagcactaaaagcgttgcttatcacccatatcggttcgttggggttgtatcttgccgccgccacgctgtttttgcagaccggaacgtttgcgcttagcgcgatgagcgagttacacggcgacgcacgttatctggtttatggcggcatcctgtttgccgcgtgggggaaatcggcccagctaccgatgcaagcgtggctaccggacgcaatggaagcgccaacaccgatcagcgcctatctccacgccgcatcgatggtgaaagtgggcgtttacatttttgcccgcgccattatcaacggcggcaatatcccgcatgtgattggcggcgttggcatggtcatggccctggtcaccattctttatggatttctgatgtatttgccacagcaggatatgaagcggttgctggcctggtcgaccatcactcaacttggctggatgttcttcggcttgtcgctctccatcttcggctcgcggctggcgctggagggcagcatcgcctacatcgtcaaccacgcgttcgctaaaagcctgtttttccttgtagcaggtgcgctgagttacagctgcggcacgcgcttgttgccgcgtctgcgtggcgtattgcacaccctgccgttgccaggcgtgggtttctgcgtggcagcgctggcgattaccggcgtaccgccgttcaacggcttcttcagtaaattcccgctgtttgctgccggttttgcgttgtcagtggagtactggatcctgctgcccgccatgattctgctgatgattgaatcggtcgccagtttcgcctggtttattcgctggtttggtcgcgtcgtccccggcaaaccgagcgaggccgtcgccgatgccgcaccgctgccagggtcaatgcgcctggtgctgattgtactgattgtgatgtcgctgatttccagcgtaatcgccgcgacctggttgcagtaaggagatgatgaatgaccggttctatgatcgtaaataatctggcgggactgatgatgctgacatcgctgtttgtgattagcgtcaaaagctatcgcctgtcatgcggattttacgcctgccagtcgctggtgctngtgtctattttcgccaccctctcgtgcctgttcgccgcagagcaactgctgatctggtccgccagcgcctttatcaccaaagtgctgctggtaccgttaatcatgacttacgctgcacgaaatattccccagaacatcccggaaaaagcgttattcggtccggcaatgatggcactgctcgcggcgttaattgtcctgctttgcgcatttgtcgttcagcccgtgaagctaccgatggctaccgggctgaaaccagcgctggcggtggcgttaggtcattttctgcttggcctgctgtgcattgttagccagcgcaatatcctgcggcaaatttttggttactgcctgatggaaaacggctcccatctggtgctggcgcttctagcctggcgtgcaccggaactggtggaaattggtatcgctaccgacgccatcttcgccgtcattgtgatggtgttactggcaagaaaaatatggcgtacccacggcacgctggacgtgaacaacttgaccgcgctgaagggataatgagatgagttattctgtgatgttcgctttactcctgctcactccgctgcttttttcgctgctctgttttgcctgccggaaacganggcactctgcgactcgcacggtgacagtattacatagcttagggatcacactgctgctgattctggcactctgggtggtccaaactgccgctgatgcaggagaaatattcgctgcgggactgtggcttcatattgatggtctgggcggtttgttcctcgccattcttggtgtgattggctttctcaccggtgtttactcgattggctacatgcgtcatgaagttgagcacggcgagctttcacccgttacgctgtgcgattactacggtttcttccatctgtttttgttcaccatgctgctggttgttaccagcaataacctgattgtgatgtgggcggcgatcgaagccaccaccttaagctcggcgtttctggtaggcatttacggtcagcgttcatcgctggaagcagcatggaagtacatcattatttgtactgttggtgtcgcttttggtctgttcggtaccgtgctggtatacgccaacgccgccagcgttatgccgcaggcagaaatggcgatattctggagcgaggttcttaagcaatcgtccttgcttgatccaacattaatgctgttggcctttgtgtttgtgctaattggctttggtaccaaaaccgggctatttcccatgcacgcctggctgccggatgctcacagtgaagcgccgagtccggtcagcgccctactctccgccgtattgctgaactgcgcgctgttggtgctgattcgctattacatcattatttgccaggccatcggcagcgatttccccaaccggttgttgctcatcttcggcatgttgtcggttgccgtggcggcatttttcattctggtacagcgggacattaagcgtctgctggcgtactccagcgtggagaacatgggactggtcgcggtggcgctaggcattggcgggccgctgggaatttttgccgcgctgctgcacaccttaaaccacagtctggcaaaaacgctgctgttctgcggttccggcaatgtactgctcaagtacggcacgcgcgatctcaacgtcgtctgtgggatgctcaaaatcatgccatttaccgccgtgctgtttggcggcggtgcgctggcgctggcagggatgccgcccttcaacatttttcttagcgaatttatgaccgttaccgccggactggcacgtaatcacctgctgattatcgtcctgctgttattgctgttaacgctggtgctggcgggcctggtacngatggctgcgcgggtgttaatggcgaaaccgccgcaggccgttaaccggggtgatctcggctggttgaccacctcgccaatggtgattctgctggtcatgatgctggcgatgggaacgcatattccacaacctgtcatcaggatcctggcgggcgnttccactatagtcctctcagggacgcacgacctgcctgcacaacgtagcacctggcatgattttttgccttcaggcaccgcatctgtttcggagaaacacagtgaacgttaattcatcgtcaaatcgtggcgaagcgattctcgccgccctgaaaacgcagttccccggcgcggtgctggatgaagagcgacaaacgcctgaacaggtcaccattacggtgaaaatcaatctgctgcctgacgttgtacagtatctttattatcaacatgatggctggcttccggtcctgtttggcaacgacgagcggacacttaacggtcattacgcggtttattatgccctttcaatggaaggggccgaaaaatgctggattgtggtgaaggcgctggtcgatgccgacagtcgggagtttccgtcagtcacaccgcgcgtccctgccgcggtctggggcgagcgagaaattcgtgatatgtacgggctgattccggttggcctgccggatcagcgtcgcctggtgttgcccgatgactggccggaagatatgcatccgctgcgcaaagatgcgatggattatcgactgcgccctgaaccgacgactgattccgaaacgtatccgtttatcaatgagggcaacagcggtgcgcgggtgatccctgtcggcccgctgcatatcacctccgatgaaccgggtcacttccgcttgtttgtggatggcgagcaaattgtcgatgctgattaccgtctgttttatgtccatcgcggcatggagaaactggcagaaacgcggatgggctacaacgaagtgaccttcttatcggaccgcgtgtgtgggatttgcggttttgcccacagtgtggcctataccaactcggttgaaaatgcactggggattgaggtgccgcaacgagcgcataccattcgctcgattctgctggaagtcgaacggctacacagtcatttgctcaaccttggcctctcctgccattttgttggatttgataccggctttatgcaatttttccgcgtgcgggaaaagtcgatgacaatggcggaattgctgaccgggtcgcgtaaaacctacggtctgaatctgattggtggtgttcgccgcgatattctcaaagagcaacgtctgcaaacgctgaaactggtgcgcgagatgcgcgccgacgtgtcggagctggtagaaatgctgcttgccacgccgaatatggaacaacgcactcagggcattggcattctcgaccgacaaatcgcccgtgattatagccctgtagggccgctgatccgcggcagtggttttgcccgtgatttgcgctttgatcacccctacgccgactacggcaatattccaaaaacactgtttaccttcaccggcggcgatgttttctcccgcgtgatggtccgtgtcaaagagacgtttgattcgctggcaatgctggaatttgctctcgacaacatgccggataccccactgctgaccgaaggctttagctataaacctcacgcattcgcgctcggctttgttgaagcgccacgcggtgaagacgtgcactggagcatgctcggtgataaccaaaaattgttccgctggcgctgccgtgccgccacctacgccaactggccggtgttgcgttacatgctgcgcggcaataccgtttctgacgcaccgctgattatcggtagccttgatccctgctactcctgtaccgaccgtgtgacgctggttgatgtgcgcaagcgccagtcaaaaaccgtgccgtataaagagatcgaacgctacggcattgatcgtaaccgttcgccgctgaagtaaggacagaagatgctgaagttactgaaaactattatgcgcgccggaaccgcgacggtgaaatatcccttcgcgccactggaggtcagcccaggctttcgcgggaaaccggacctgatgcccagccaatgtattgcctgtggtgcctgcgcctgtgcttgtccgacaaatgcgctgactatccagaccgacgaccagcaaaattcgcgcacctggcagctctatctggggcgttgtatttactgcggacgttgtgaagaagtgtgcccgaccagagccatccagcttaccaataactttgaactgaccgtcaccaataaagccgatctctatacccgcgcgacgttccatctacaacgttgcagccgttgcgaacgcccgttnnnnccgcaaaaaaccgtcgcactggctgctgaattgttggcacagcaacaaaatgcgccacaaaaccgcgaaatgttgcgggcgcaagcgagcgtctgcccggagtgcaaacaacgcgcgacgctgatcaacgacgatacagatgtaccgctggtggctaaggagcagctatgagtccagtgcttacacaacatgtcagccagcccatcacgctggacgagcaaacgcaaaagatgaagcggcatttgctacaggatatccgtcgctcagcctacgtttatcgcgtcgattgcggcggctgcaacgcctgtgaaatcgaaatttttgccgccatcacacccgtattcgacgcagaacgttttggcattaaggttgtttcatcaccgcgtcacgccgatattttgttatttactggcgcagtcacccgggcgatgcgtatgcctgcacttcgggcgtatgagtctgcccccgatcataaaatctgtgtttcctacggcgcgtgcggtgtcggcggcggtattttccacgatctctacagcgtctggggcggcagcgacaccattgtccccattgatgtttggatccccggctgcccgccaacaccggccgccaccattcacggtttcgccgtggcgctcggtttgctgcaacagaagattcacgcggtggattatcgcgatcccaccggggtgactatgcaaccgttgtggccgcagatcccgccatcacagcgtatcgccattgagcgagaagcgcggcggctggcgggctatngtcaggggcaagaaatttgcgatcggctcctgcgccatttaagcgacgatcctacaggaaatcgggttaacacctggttgcgcgatgccgacgctccacgtctcaatagtatcgttcagcaactctttcgcgtactccgggggttacatgactgaagagtgcggggaaattgttttctggacgctgcgaaaaaagtttgtcgccagtagcgacgagatgccggaacacagctcccaggtaatgtattactcgctggctatcggtcatcacgttggcgtgattgattgtctgaatgtcaccttccgctgcccactgacggaatacgaagattggcttgcactggtcgaagaggagcaagcccgacgtaagatgctgggggtgatgacttttggtgagattgttattgacgccagccacaccgccctgttgacccgggcattcgcgccactggcagatgacgcgacgtctgtgtggcaagcgcgtagcattcaattcattcatctgttggatgaaattgtgctggaaccggctatctatctgatggccagaaaaattgcgtgagaaggatttctcattaataaggactgttgatggctatgtcagacgaggcgatgtttgccccgccgcaaggaataacaattgaagcggtaaacggaatgctcgcggagcggttagcgcagaaacacggcaaggcgtctttattacgcgccttcatcccgctgccgccgccgttcagcccggtacaacttattgaactgcatgttctcaaaagcaacttctattaccgctaccatgatgatggcagcgatgtgacggcaacaacagagtatcagggcgagatggtcgattattcgcgtcacgccgtccttctcggcagtagtggaatggcggagctacgctttattcgcacccacggcagtcgttttactccccaggattgcacactgtttaactggctggcacgcattatcaccccggttctgcaatcatggctcaatgatgaagaacaacaggtggcgctgcgtttgctggagaaagatcgcgatcatcatcgggtactggtggatatcactaatgcagtgctgtcacatcttgatctcgacgatctgatcgctgacgtcgctcgtgagatccatcattttttcggtctggcttcagtcagtatggtactgggcgatcatcgaaagaacgagaagttcagcctgtggtgcagcgatctttctgcctcacattgtgcgtgtctgccacgcaatatgcctggcgacagtgtattgctgacacaaacgctacaaacccgacaaccgaccttgacgcaccgtgcagacgatctgtttctctggcaacgcgacccgttattacacttacttgcatctaacggctgcgaatcttcgctcctgataccgcttacctttggcaaccatacaccgggtgcattgttgctggcgcatacctctaccactctctttagtgaggaaaactgccagctactacaacacatagccgatcgcatcgctattgccgttggcaatgccgatgcctggcgtagcatgaccgatttgcaggaaagtttgcagcaagaaaaccaccagcttagcgagcagctcctttcgaatctgggcgtcggtgacattatctatcaaagccaggcaatggaagacctgctccagcaggtagatattgtggcgaagagcgacagtacggtgttgatttgtggtgaaaccggaaccggcaaagaggtgatcgccagagcgatccatcaacttagcccgcgacgcgacaagccgctggtcaaaatcaactgcgctgccatccccgccagtcttctggaaagtgagttattcggtcatgacaaaggggcctttactggtgcgattaatacccatcgtggtcgttttgaaattgccgatggcggtacgttgtttctcgatgaaattggcgatctgccgttagaacttcagcctaaattgctgcgcgtattgcaggagcgggaaattgagcgtctcggcgggagtagaacgatcccggtgaatgtcagagtcattgccgccaccaaccgtgatttgtggcaaatggttgaagatcgccagtttcgcagcgatctcttttatcgcctgaatgtcttcccactggaattgccgccgctgcgagaccgtccggaagatatccctcttttagcaaaacatttcacgcaaaaa

SEQ ID NO: 1365 - DNA, 362 bp, Escherichia coli
  Strain O55:H7
  modified_base (361)..(361): a, c, g or t
gccatatgaatcgcgcaattgacgccatcccgaccgaggcactacgccagttgatgtcgtgggattggccgggcaacgtgcgcgagctggaaaacgtgattgagcgagcggtactgctgactcgcggtaacagtctgaatttacatcttaatgtccgacaaagccgtttactgccgacgctaaatgaagattcagcgcttcgcagttcaatggcgcagttgctgcacccgacgacgccagagaatgacgaagaagaacgtcagcgcattgttcaggtattgcgagaaaccaatggcattgttgccgggccccgtggcgcggcgacacgattagggatgaagcgcaccacgctgctgtcacng

SEQ ID NO: 1366 - DNA, 6333 bp, Escherichia coli
  Strain O55:H7
  modified_base (1062)..(1062): a, c, g or t
  modified_base (1408)..(1408): a, c, g or t
  modified_base (2397)..(2397): a, c, g or t
  modified_base (4365)..(4366): a, c, g or t
  modified_base (4904)..(4904): a, c, g or t
cgtctggggatctcggttcgcgaggtgttgtaatctgcttttgcaggagtatgcatgagaaacaaactctctttcgacttgcagttgagcgccagaaaagcggcaatcgctgaacggattgccgcccataaaattgcccgcagtaaagtgtcggtctttttaatggcgatgtccgctggcgtgtttatggcgatcggatttactttttacctttccgttatcgccgatgccccgtcttcacaggcattaacccatctggtgggcggcctttgctttacactcggctttattttgctggcggtttgcggcaccagcctgttcacctcgtcggtaatgacggtgatggcaaaaagtcggggcgttattagttggcgaacttggctgattaacgcacttctggtggcctgcggtaatctggcaggtattgcctgtttcagtttgttaatctggttttccgggctggtgatgagtgaaaacgcgatgtggggagtcgcggttttacactgcgccgagggcaaaatgcatcatacatttactgaatctgtcagcctcggcattatgtgcaatctgatggtttgcctggcgctgtggatgagttattgcgggcgttcgttatgcgacaaaatcgtcgccatgattttgcccatcaccctgtttgtcgccagtggctttgagcactgtatcgccaatttgtttgtgattccgttcgccattgccattcgccatttcgcccctacctccttctggcaactggcgcacagtagcgcagacaattttcctgcactgacggtcagccattttattaccgccaatctgctcccggtgatgctgggtaatattatcggcggtgcagtgctggtgagtatttgttatcgggctatttatttacgtcaggaatcctgaaaaatcagcccggcgaaacagttcgtcgggctgaagattattcttgcgctatttgcccatcgggccaggcgtggatcacggctttgatcagcgtcgccaatggaatggcgaagaatacgccccagaatccccacaaaccaccgaagatcaccaccgatnaaataatcaccagcggatgcaggttaaccgcttcggagaacaacaccggtactaacaggttgccgtcaagcgcctgaatgatcagatacaccgcgaaacagctccagaattcagtgcctgcaccaaactggaatagcgccacgccaaccaccggaatggtcaccacaaatgcgccaatgtacggaataagtaccgagaagccgaccagcaccgccagcagcagcgaatagttcagcccgaagagtaagaatcccagccaggtggcgatccctactacgatcatctccagcactttgccgcggatatagttggtgatttgttgattcatctccttccacacctgtcntgccagtccacggttacgcggcagcacccggcgaacggcattcagcatctgctctttgtctttcagcaggaagaagaccatcaatggtaccagcaccagatagacggcaatggtcagcaaaccgaccagcgaggcgagggaaattttcaccaccgaatcgcccatggtcagcatccgactgcgcatattttcggccattgcatcaataatgcccgcatccattaacgccggatagcggcgcggcaacgtggcggcaaagtcagaaagcttattgagcatccccggcatatcgcggattaagtagatgccctgctgccaggcgataggcagtaccacgaacgccatcagtagcaatataccgacgaaaaccaccaatacaatcgacgtcgcccagcggcgggagcagccaatagattgcaggcgcacggttggccattccagcaaataggccagcacaatagccaccagcaacggagcaagcaggccactaaagaaaaagataatgccaaatccggcaactaaaataaccagcaaggcaatcgcttccgggtcgctaaaacggcggcgataccattgcatcaacatttcgagcataaagaccttccctgaacctcaagagcgggattgcgatccgcaattgtatcgaaatgtcacaaaaaagacttcgctttttatgacggattcaggaaactgaaaagtcatttgagtgggctaatcttcgccgttacactcaaaggcggcgcggtgggaacgatatttcacagtatcggtcaaatgactatcttcagaaatacaggatagaggttatgttcaggcagttgaaaaaaaacctggttgcaaccctcattgctgctatgaccattggtcaggtagccccggcatttgccgacagcgcagacaccttgccggatatgggaacctccgcaggaagcacgctttccattggtcaggaaatgcagatgggcgactattatgtccgccagctacgnggcagcgcgccgttaattaatgacccgctgttaacgcaatatattaattcgctggggatgcgtctggtttcgcatgccaattcggttaagacaccgtttcatttctttctgatcaacaacgacgaaattaacgcctttgctttctttggcggcaacgtggtgctgcactctgccctgttccgttattccgataacgaaagtcaactggcttcagttatggcgcacgaaatctcccacgtcacccaacgtcacctggcgcgagcgatggaagatcagcagcgcagcgcgccgctgacctgggtcggcgcgttaggttctattttactggcgatggccagtccgcaggcggggatggcggcgctgaccggtacactggcgggaacgcgtcaggggatgatcagtttcacccagcaaaatgaacaggaagcggaccgcattggtattcaggtgctgcaacgctcgggattcgatccgcaggcgatgccaaccttcctcgaaaaattactcgatcaggcgcgttactcctcgcgcccgccggaaattttactgactcacccgttgccggaaagtcgtctggcagatgcccgcaaccgtgctaatcagatgcgcccgatggtggtgcagtcgtcggaagatttctatctggcgaaagcgcgcacactggggatgtataattccggacgtaaccagctcaccagtgatttgctggatgaatgggcgaaaggaaacgttcgtcagcaacgagcggcgcaatatggtcgtgctttacaggcgatggaagccaataaatacgacgaggcgcgaaaaacgctgcaaccgttactggcggcagaacctggcaacgcatggtatctcgatctggctactgatatcgatcttgggcaaaacaaagccaatgaggcgatcaatcgtctgaaaaatgcccgcgatttgcgcaccaatcctgtgttgcagctcaacctggcgaacgcttatctacaaggcggtcaaccacaagaagcggccaatattcttaatcgctacacctttaataataaagatgacagcaacggctgggatttgctggcacaggcggaagccgcgctaaataaccgcgatcaggagctggctgcgcgagcagaaggttatgcgctcgccggacgactcgatcaggccatttcgctgttgagtagcgccagttcgcaggtgaaattaggcagcctgcaacaagcgcgttacgatgcgcgcatcgaccagttgcgccagctgcaggaacgctttaagccttataccaagatgtaattcgcattaaaggaagaacaatgaccaaacaggtaaaaatctaccataacccacgctgttcaaagagccgggaaacgctgaacctgctgaaagaaaacggcgtggagccagaagtggtgctctaccttgagacacccgccgatgcggcaacgctgcgcgatttgctgaaaatgctggggatgaatagcgcccgtgaattgatgcgccagaaagaggatctttataaagaactgaacctggctgacagttcgcttagcgaagaggcgctgattcaggcaatggtggataatccgaagctgatggagcgcccgattgtggtcgcgaatggcaaagcgcggattggtcgtccaccggagcaggtactggaaatcgtgggttaagatgtgctccatcgctagttgaagcacattgccggatgcgacgcttgccacgtcttatccggcctacgaattctatggattaacttcgcgtagttcggataaggcgttcgcgccgcatccgacaataaacaccttatctacaacttcagaatttctttcacaaacggaatggtcagcttacgttgcgcggtaatcgacgcacgatccaactgatccaacgtcataaatagcgtgcgcatttctctgtcgagccgcttcagcaagaaacgccccacatcttccggcagttcaaaaccacgcaaacgcnngcgtaactgtagcgcctgcaacttatcttcatcagaaagtggctgcaatttgtagatctgcccccagtcgagtcgcgacgcgagatccggtaatcccagattcaactgccgcggtggacgatcgccggtgatcaacaaccgtgttttgcccgattccagaattcgattgtagagatcgaaaatcgccatctcccacaactcatcgcctgcaatacactcaatgttgtcgatacagaccagcgacaaatgctccataccgtcgagcacttccggaacaaaccaggtgcgtttatccagcgggacatagcccaccgcatcgccacgctgcgacaattccgcgcaagccgcgtgcagcagatggctgcgccccgcgccttcgcgtgcccagagatagatgtaaccgctatgttcctgacgcagcacgttttgcagcgcggccagtaaagaggagttatcccccggccagaaacttgcaaaggtttcgtcgtcaggaagataaagtggcaaagagagctgtgccggtgtgttcagagatacntcaaccaggatttcacaaaatcgcgagaagtttaccacagaatcccatgatgtttgaaccgggcagcaacactgcccggtcggtacattatttgtctgttatatccgcgtcttctgcgtccagcaccacttcttcagggcgcagcacactaatcagtttgaaaatcaaacttaagccgataccgacgatggtcgccagcgccatacctttcagctccgccgcgccaatgtttaccttcgcgccactgacgccgatgatcaaaatcacggaagtcaggatcaggttctgtgctttgttgtaatccactttcgattcgatcaaaacacgaataccggaagcaccgatgacaccataaagcagcagcgaaacgccgcccatcaccggcaatgggatcatctggatagcggcagccagtttaccgacgcaggaaagcaggatagcgaaaatcgccgccccgccgataacccaagtactgtaaacacgggtgatcgccatcacgccaatgttttccccgtaggtggtgtttggcgtggagccaaagaagccggagatcacggtcgacaagccgttagcaaacatcgaacggtgcagacctggatcgcgcagcagatcttttttgacgatattagccgttactaccaggtgccctacgtgttcggcaataaccactaacgccgctggcagaatagtcagaatggcaaaccactcgaagcgcggcgtatagagggttggcagcgcaaaccagtgagcattaataatcggcgtggtatcgacaattcccattgcgaaagagagcgcgtaccccaccagcacgccaattaaaatcgggataattgccaggaaaccacggaacagcacggaacctaaaaccgtgaccgccagggtggtaatagagatgatgatggttttggagtctggcgtttgcccttcagccgggagtaaacccgccataccggcagctacgcccgccagctccagaccgatgacggcaacgattgcgcccattgccgcaggtggaaacagcacgtccagccagccggtccccgctttcttcacgataaaagaaaccaggcagaacagcacgccgcacataataaagccgcccagcgcgacttcataccctaacggcaacagtaacaataccggtgaaataaaggcaaagctggaaccaagataagccggaattttccctttacagatgaagagatacagcagcgttccaataccgttaaataacagtacagtcgccgggttaatatgaaataagacgggcaccaggacggttgcaccaaacatggcgaacaaatgttgcaaactaagcgggattgtctgtaaaagtggcggtctttcactcaccccgatagcacggcgcgtcatagtattatcctctgtattatgtgttataggcgctttactcaaaaaaaagccg

SEQ ID NO: 1367 - DNA, 9461 bp, Escherichia coli
  Strain O55:H7
  modified_base (689)..(689): a, c, g or t
  modified_base (1510)..(1510): a, c, g or t
  modified_base (1555)..(1555): a, c, g or t
  modified_base (1934)..(1934): a, c, g or t
  modified_base (2339)..(2339): a, c, g or t
  modified_base (4256)..(4257): a, c, g or t
  modified_base (4821)..(4821): a, c, g or t
  modified_base (5328)..(5328): a, c, g or t
agtcggctttaattatttttattctttatttcgtaccaaagattttgtcaccggcatcgccgaggcccggaataatgtatccgtgctcgttcagtccctgatcaatcgatgcggtatacagttcgacgtccgggtgcgctttttccagcgcagcgataccttctggcgcagctaccagcaccagaactttgatgctgctgcagcccgcttttttcagcaggtcgatggtcgcaataacggaaccaccggttgccagcattgggtcaacgatcagcgccatacgctcatcgatgttagaaaccagtttctggaagtacggtaccggctccagcgtttcttcattacggtacataccgacaacgctgatgcgcgcgctcggaacgttttccagcacaccgtccatcatccccagacccgcacgcagaattggcacaacggtaattttcttacctttgatctggtcgatttctaccgggccgttccagccttcgatagttactttttccgtttcgaggtcggcggtcgcttcgtaagtcagcaggctacccacttcggaagcgagttcgcgaaagcgcttggtgctgatatcttgctcacgcatcagtcccagcttgtgtttgacgagtgggtgtttgacttccacgatcttcatactctttctcctttgaggggcagccacaaaaaaaatngacggattatacctcctttcttcaaggcggcaatattattttcgttgactttagtcaaaatgataacggtttgagataaagttattttatattcaaatggttatgaaagaagattattccatccgaaaactaacctttgccctggcacaagtcttctttcgccgcgcgcctggggaaaagacgtgcaaaaaggttgtgtaaagcagtctcgcaaacgtttgctttccctgttagaattgcgccgaattttatttttctaccgcaagtaacgcgtggggacccaagcagtgaccgataaaacctctcttagctacaaagatgccggtgttgatattgacgcgggtaatgctctggttggaagaatcaaaggcgtagtgaagaaaacgcgtcgtccggaagtgatgggcggtctgggcggcttcggtgcgctgtgtgcattgccgcaaaaatatcgtgaacccgtgctggtttccggcactgacggcgtaggtaccaagctgcgtctggcaatggacttaaaacgtcacgacaccattggtattgatctggtcgccatgtgcgttaatgacctggtggtgcaaggtgcagaaccgctgtttttcctcgactattacgcaaccggaaaactggatgttgataccgcttcagcggtgatcagcggcattgcggaaggttgtctgcaatcgggctgttcactggtgggtggcgaaacggcagaaatgccggggatgtatcacggtgaggattacgatgtcgcgggtttctgcgtgggcgtggtagaaaaatcagaaatcatcgacggctctaaagtcagcgacggngatgtgctgattgcactcggttccagcggtccgcactcgaacggntattcgctggtgcgcaaaattcttgaagtcagcggttgtgatccgcaaaccaccgaacttgatggtaagccattagccgatcatctgctggcaccgacccgcatttacgtgaagtcagtgctggagttgattgaaaaggtcgatgttaatgccattgcgcacctgaccggcggcggcttttgggaaaacattccgcgcgtattgccagataatacccaggcagtgattgatgaatcctcctggcagtggccggaagtgttcaactggctgcaaacggctggtaacgttgagcgccatgaaatgtatcgcaccttcaactgcggcgtcgggatgattattgccctgcctgctccggaagtggacaaagccctcgccctgntcaatgccaacggtgaaaacgcgtggaaaatcggtatcatcaaagcctctgattccgaacaacgcgtggttatcgaataatgaatattgtggtgcttatttccggcaacggaagtaatttgcaggcaattattgacgcctgtaaaaccaacaaaattaaaggcaccgtacgggcagttttcagcaataaggccgacgcgttcggccttgaacgcgcccgccaggcgggtattgcaacgcatacgctcatcgccagcgcgtttgacagtcgtgaagcctatgaccgggagttgattcatgaaatcgacatgtacgcacccgatgtggtcgtgctggctggttttatgcgcattctcagcccggcatttgtctcccactatgccgggcgtttgctgaacattcaccnttctctgctgccgaaatatcccggattacatacccatcgtcaggcgctggaaaatggcgatgaagagcacggtacatcggtgcatttcgtcaccgatgaactggacggtggcccggttattttacaggcgaaagtcccggtatttgctggtgatacggaggatgacgtcaccgcccgcgtgcaaacccaggaacacgccatttatccactggtgattagctggtttgccgatggtcgtctgaaaatgcacgaaaacgccgcgtggctggatggtcaacgtctgccgccgcagggctacgctgccgacgagtaatgccccgtagttaaagcgccagctctgccgctggcgtttttcaattcacctgtaaatcgcaagctccagcagtttttttcccccttttctggcatagttggacatctgccaatattgctcgccataatatccaggcagtgtcccgtgaataaaacggagtaaaagtggtaatgggtcaggaaaagctatacatcgaaaaagagctcagttggttatcgttcaatgaacgcgtgcttcaggaagcggcggacaaatctaacccgctgattgaaaggatgcgtttcctggggatctattccaataaccttgatgagttctataaagtccgcttcgctgaactgaagcgacgcatcattattagcgaagaacaaggctccaactctcattcccgccatttactgggcaaaattcagtcccgggtgctgaaagccgatcaggaattcgacggcctctacaacgagctattgctggagatggcgcgcaaccagatcttcctgattaatgaacgccagctctccgtcaatcaacaaaactggctgcgtcattattttaagcagtatctgcgtcagcacattacgccgattttaatcaatcctgacactgacttagtgcagttcctgaaagatgattacacctatctggcggtggaaattatccgtggcgataccatccgttacgcgcttctggagatcccatcagataaagtgccgcgctttgtgaatttaccgccagaagcgccgcgtcgacgcaagccaatgattcttctggataacattctgcgttactgccttgatgatattttcaaaggcttctttgattatgacgcgctgaatgcctattcaatgaagatgacccgcgatgccgaatacgatttagtgcatgagatggaagccagcctgatggagttgatgtcttccagtctcaagcagcgtttaactgctgagccggtgcgttttgtttatcagcgcgatatgcccaatgcgctggttgaagtgttacgcgaaaaactgactatttcccgctacgactccatcgtccccggcggtcgttatcataattttaaagactttattaatttccccaatgtcggcaaagccaatctggtgaacaaaccactgccgcgtttacgccatatttggtttgataaagcccagttccgcaatggttttgatgccattcgcgaacgcgatgtgttgctctattatccttatcacacctttgagcatgtgctggaactgctgcgtcaggcctcgttcgatccgagcgtgctggcgattaaaatcaacatttaccgtgtggcaaaagattcacgcatcatcgactcgatgatccacgccgcacacaacggtaagaaagtcaccgtggtggttgagctacaggcacgttttgacgaagaagccaacattcactgggcgaagcgcctgaccgaagcaggcgtgcacgttatcttctctgcgccggggctgaaaattcacgccaaactgtttctgatttcacgtaaagaaaacggtgaagtggtgcgttatgcacacatcgggaccgggaactttaacgaaaaaaccgcgcgtctttatactgactattcgttgctgaccgccgatgcnngcatcaccaacgaagtacggcgggtatttaactttattgaaaacccataccgtccggtgacatttgattatttaatggtgtcgccgcaaaactcccgccgcctgttgtatgaaatggtggaccgcgagatcgccaacgcgcagcaagggctgcccagtggtatcaccctgaagctaaataaccttgtcgataaaggcctggttgatcgtctgtatgcggcctccagctccggcgtaccggttaatctgctggttcgcggaatgtgttcgctgatccccaatctggaaggcattagcgacaacattcgtgccatcagtattgttgaccgttaccttgaacatgaccgggtttatatttttgaaaatggcggcgataaaaaggtctacctttcttccgccgactggatgacgcgcaatattgattatcgtattgaagtggcgacgccgctgctcgatccgcgcctgaagcagcgggtgctggacatcatcgacatattgttcagcgatacggtcaaagcacgttatatcgataaagaactcagtaatcgctacgttccccgcggcnatcgccgcaaagtacgggcgcagttggcgatttatgactacatcaaatcactcgaacaacctgaataaccctatgccaatacacgataaatcccctcgtccgcaggagtttgctgcggtcgatcttggttcaaacagttttcacatggtcatagcccgtgtggtagatggtgccatgcagattattggccgcctgaaacagcgggtgcatctggcggacggcctggggccagataatatgttgagtgaagaggcaatgacgcgcggtttgaactgtctgtcgctgtttgccgaacggctacaagggttttctcctgccagcgtctgtatagttggtacccatacgctgcgtcaggcgctgaacgccactgactttctgaaacgtgcggaaaaggtcattccctacccgattgaaattatttccggtaatgaagaagcccgtctgatttttatgggcgtggaacatacccaaccggaaaaaggtcgcaaactggttattgatattggnggcggttctacagaactggtgattggtgaaaatttcgaaccgattctcgttgaaagccgccggatggggtgtgtcagctttgcccagctttatttccctggcggggtcatcaataaagagaattttcagcgcgctcgcatggcggcagcacaaaaactggaaactttaacctggcaatttcgtattcagggctggaacgtggcaatgggcgcttccggtaccataaaagccgcccatgaagtgttaatggaaatgggcgagaaagacgggataattaccccggaacgtctggaaaaactggtaaaagaagttttacggcaccgtaatttcgcatcgctgagtttaccaggtctttccgaagagcggaaaacagtcttcgttcctggactagcgattttatgcggtgtgtttgatgctttagccatccgtgaactgcgcctttctgacggggcgttacgcgaaggcgtactgtatgaaatggaaggacgtttccgtcatcaggatgtgcgtagtcgcaccgccagcagcctcgccaaccagtatcacatcgacagcgaacaggcccgacgggtgctggataccactatgcaaatgtacgaacagtggcgggaacagcaaccgaagctggcgcatccgcaactggaggcgctactgcgatgggccgccatgctgcatgaggtcgggttgaatatcaaccacagcggtttgcatcgtcactccgcttatattctacaaaacagcgacttgccgggttttaatcaggaacagcagctgatgatggcgacactggtgcgctatcaccgtaaagcgattaaactcgacgatctgccgcgctttaccttgtttaagaagaaacagttcctgccactgattcagctattgcgccttggcgtattactcaacaatcagcgtcaggcaaccaccacaccgccaacattgacgctgattactgatgacagtcactggacactgcgtttcccgcatgactggtttagtcagaatgcgctggtactgcttgatctggaaaaggagcaagaatactgggaaggcgtggctggctggcggttgaaaattgaagaagaaagtacacctgaaatcgcagcttaatgctttgcgggccgacgagaaatgtcggcccgcattattcaggcactttcgcgaatgggttcgatttcattcagcgtatcaattaacggttgcggcttaccaataagataaccctgcatataatcgatccccaaagagagcaccgcctcgcggatctcttcgttttcaacgtactctgccactacccgcattttcttcattcgcgccaggtggcaaatcgatgccactatctgataatccagactatttgacacaatattgcggataaaactgccgtcaattttaagcagatcggcattcacatttttaagccgcgcatagctggcgtagccggtgccgaaatcatcaatcgcaatctggcagcctaattcctgaagatgctgcaaggtgatttgcgcctgcttaacattggtcagagcattactttcggtgacttcaaaaataagttgccacgcttcaatctgatatttatccagcaactgactgacttcaacaggaaaacgagcctgacataccgaggttggagacagattaatagcaaaacggtgagcgggcatcttcgctctgttttcagccataaattgcagcgtatgctcaatgacccacatgtcgatactcgacgataaaccaaattcgtgcgcgaccggcaagaagctatcggggccgattagttcatcattctcacctttcatgcgcagaagaatttcatggtaaacatcaccacgcataccggtaatcggctgggccatcaggaaaaaatggttgtgttccagcgcctgctgtagtcgattcatcatcgcgactttatctttcaattcgcgttgcaaatacattgccccgcgacgctgcatattttccggggcgttggtcacgatggaaagttcggcgaccgtatttagctctcccagcagcaggtagatatgattcactggcgagcgcacatagcagtaactgacgccaatctgcggttgcatcggcatgccatcccaaaagaaacgaaattgcttgagatggctatccagtgcggtaatgcgctcctggtgcgattctgtattcagtcgcagcgcgagatcgttacccgaaagctgataaacatcttcacctggttccagcaagggtgacagccagtgagaaagtttttgcttgtattgaatccgcagcatgatgccatagtttttaaccagcatttccatgccagggatgcgtaaataacaaagcgcagaccagggggcatcacgcaacgcgcgattcagggcgcgaacatttggcagatgaaccaccgggtccacatacgcaaggcgctgaatgcgtctgactaccgttctctgacgggttgccagtacagccatataattgacaataaaagagaataccagataactggaggaggttatggtcagctgcgtggtatagccaggataaatgggaatgtaattttgatagctgtggatgctgatcatcaacacgaccgcccagagcagcgaaatcagcttataaccatagcgcatcgctccccacatcatcaggggcagcaataatgacaaggtataattggtgctaaaaattgtgcttttttcatttaacggcatgcataacagcaacagtaaagcacctaatgccagcagccagagtgcgaactcttttttggtgactttgacatcaacctgctgttttaattgcgaataataactacgtaaataaaacggatttcgcactacccgaatgatgaagtagcacagcgggacaccaatcagattgcccaccagtaaggcctgataattgattaaggtcccgagattaaaaggcatgacgccaaccagattttctctgctcgccagtaatcctacaaatgcagcaaactggaaaagtatcagaaacagcgttgcaggaaacacaatctgccagaatatacgctgggaaattaaacgggtatcaccatgtgaaacgttgttacgccggggagtaaagaccctgtaaccgccccaacagagaatgataatgataataaaattagccgttaatgagagcgtttcgtaaaaacccagctctgcatatttgcggacaaaaatccctaaggcgatccctggcaatgccgcccagctgaaaaacatcatcatgctgatcatcagtgccagaggcagataaaagagaaaaacctcaccggaagaaatatgcgcgaaagtattaatgtgggcgaaaatgggcaagattaaagaaggcaggaacagcggaagcccccaccatttatcacgtatttttatataagttgcattcagtttcatagatgctcagcagaatcccccacatcctgaaggaggtgtattcagacaggcatcccacctgacttcgaatgatgattattcatcactatagagagcattgattctaagtgtcatatgaaagttccaattgatatatatcaaacaaaataaccctgattaatgaattattacgtttatcatgttaattcatcattattacatcatcattgtaaataattaaattaacttccataacattaaaatatgtatccactgacgattttttacataacgaagaattgaccattttgtcctgttgtgccttaatgtaagtaccgtccacggcgtgggacatacttcaaggaaccttttgtgagtcaggcaaccagtatgcgaaaacgacaccgatttaacagtcgcatgacccgtatcgtactgctcatcagctttatcttcttctttggccgttttatctactcgtccgtcggtgcctggcagcaccatcagagcaaaaaagaagctcagcaatccacactctccgtcgaatcaccggtacaacgttagcggttaccttctccactttcacagaacataacggcgcttcgctgtcggatgcttttgctctttggaattatcaaagcggcagatattctttcatcttaaattatacgtctttgtcccgactgatgtttatcctgtttggctgcgaaataaatataaaattaatatatatgttgtaatgatgtatttttataaattattccc

SEQ ID NO: 1368 - DNA, 2459 bp, Escherichia coli
  Strain O55:H7
  modified_base (6)..(7): a, c, g or t
  modified_base (1861)..(1861): a, c, g or t
  modified_base (2381)..(2381): a, c, g or t
taatanntttaatccatccctttatacgcaatacatttactttcctcttttgatgatcttaaatgtcttatttttcgtaatgtgtataacaaggaatagtgatgaaatttaaaaaatgtcttctgcctgtggcaatgttagcgtcattcactctggcaggatgccagtcaaatgctgacgatcatgccgccgatgtttatcaaaccgatcaactgaataccaaacaagaaactaaaaccgttaatattatttccattcttcccgcaaaagttgccgtagacaactcccaaaataaacggaacgcacaagccttcggcgcgcttattggcgcagtcgctggcggtgttatcggccacaacgtcgggtctggcagcaattccggaacgacggcaggtgcagttggctgcggagctgtaggcgcggcagcgggttctatggtgaatgataaaaccttagtggaaggtgtttctttaacgtataaggaaggcaccaaagtgtatacctctactcaggtgggtaaagagtgccagtttacgacaggtttagccgttgttattaccacgacgtataacgaaacgcgtattcagccaaataccaaatgtcctgaaaagagctaataatcaggaggagtcatgaagaaagtttttctttgcgccatcttagcctccttaagctatccggctatcgcctcatcattgcaggatcaactctctgctgtcgcagaagcggaacagcaaggtaaaaatgaagagcaaaggcagcatgacgaatgggtcgcggagcgcaacagggaaatccagcaagagaagcaacgtcgcgcaaatgcccaggctgccgctaacaaaagagcggcaacggcagcggcaaataagaaagctcgtcaggataaactggacgccgaagccactgcggacaaaaaacgcgatcaaagttatgaagatgagctacgcagcttagagattcagaaacaaaaactggcgctggcaaaagaagaagcccgcgttaagcgagaaaacgaatttatcgatcaggagctgaagcacaaagccgcgcaaactgatgtcgtgcaatctgaagctgacgccaacagaaatatgactgaaggcggtcgcgatctgatgaaaagcgtgggcaaagcagaagagaataaatcggacagctggtttaattaatcgatgttagtaacttcaagcctataattcttgaagataaaaaaccctctgtagtaacagagggttttgttcattcatagtgcagggtcaaatcattcccactcaatggtagctggtggcttgccgctgatgtcatacaccacgcgggaaataccgttcacttcattgataatgcggttggaaacgcgaccgaggaaatcgtacggcagatgcgcccagtgtgcggtcataaagtcgatggtttcgacagcacgcagagagacaacccagtcatacttacgaccatcgcccattacgccaacggaacgtactggcaggaagacggtgaacgcctggctgactttgtcgtacaggtccgctttacgcagttcttcaatgaagatggcgtcagcacggcgcagcaggtcacagtactctttcttcacttcacccagaacacgaacgccaaggcctggtcccgggaacgggtgacggtacagcatgtcgtacggcaggcccagctccagaccaatcttacgcacttcgtctttgaacagctctttcagcggttcaaccaggcccatcttcatctctttcggcaggccgcccacgttgtggtgagatttgatgacgtgtgctttaccggttgcagacgccgcagattcgataacgtcagggtagatggtgccctgcgccagccacttcacgtnttccagtttcagcgcttcttcatcgaatacttcaacgaaaacgcgaccgatgattttacgttttgcttccggatcgttttcgccagccagcgctgacaggaagcgatcttctgccggtacgtgaacaatgttaagaccaaagtgatcgccaaacatatccagaacctgctctgcttcgttgagacgcagcaggccgttgtcgacgaatacgcaagtcaggtttttaccgatagcgcggtgcagcagcattgcggttacggaggaatccacaccaccagagaggccgaggatgactttatcgtcgcctacctgctcgcggatgcgagctacagcatcgtcgataattttcgctggcgtccacagggcttcacactggcagatatcacgcacaaaacgctccagcatgcgcataccctggcgggtgtgagtcacttccgggtggaactgtacgccatagaagcgtttttcttcgttagccataatggcaaacgggcagctttcggtgctggctacggtgacnaagtcggacgggatagcggtaactttatcgccgtggctcatccagacatcgagcagcggtttaccgtctgcggtcagc

SEQ ID NO: 1369 - DNA, 32470 bp, Escherichia coli
  Strain O55:H7
  modified_base (120)..(120): a, c, g or t
  modified_base (129)..(129): a, c, g or t
  modified_base (1951)..(1952): a, c, g or t
  modified_base (2056)..(2056): a, c, g or t
  modified_base (2341)..(2341): a, c, g or t
  modified_base (2361)..(2361): a, c, g or t
  modified_base (2409)..(2409): a, c, g or t
  modified_base (3464)..(3464): a, c, g or t
  modified_base (3588)..(3588): a, c, g or t
  modified_base (6979)..(6979): a, c, g or t
  modified_base (8996)..(8998): a, c, g or t
  modified_base (9002)..(9002): a, c, g or t
  modified_base (10180)..(10180): a, c, g or t
  modified_base (10231)..(10231): a, c, g or t
  modified_base (11365)..(11365): a, c, g or t
  modified_base (11371)..(11371): a, c, g or t
  modified_base (11373)..(11373): a, c, g or t
  modified_base (12817)..(12817): a, c, g or t
  modified_base (14742)..(14742): a, c, g or t
  modified_base (16694)..(16694): a, c, g or t
  modified_base (17016)..(17016): a, c, g or t
  modified_base (17967)..(17967): a, c, g or t
  modified_base (18149)..(18149): a, c, g or t
  modified_base (18151)..(18151): a, c, g or t
  modified_base (18223)..(18223): a, c, g or t
  modified_base (18732)..(18732): a, c, g or t
  modified_base (19567)..(19567): a, c, g or t
  modified_base (23816)..(23819): a, c, g or t
  modified_base (25672)..(25672): a, c, g or t
  modified_base (26047)..(26047): a, c, g or t
  modified_base (28687)..(28687): a, c, g or t
  modified_base (30627)..(30627): a, c, g or t
  modified_base (30772)..(30773): a, c, g or t
  modified_base (30775)..(30777): a, c, g or t
  modified_base (31322)..(31322): a, c, g or t
  modified_base (31342)..(31342): a, c, g or t
  modified_base (31392)..(31392): a, c, g or t
tcgataccgcgaaccagtgcgctgtcgtttacgacttcaacctgcgcgtagccaaattcacgttcgttagaggcttcaacgtgaccgcccaactgcattgccatggtctgcatgccatancaaacgccnaataccggtacgcctgcttcaaagacatactgcggcgcacgcgggctgttttcttcagtagtactttccgggccgccggaaagaataatgccgcttggattgaagtcacgaatttgtgcttctgtcacatcccatgcccacagttcgcagtaaacacccagctcacgcacgcggcgcgcaaccagttgagtgtactgagaaccgaagtccagaatgaggatgcgatgcttatgaatgttttccgtcattgacgcttattccgaggcaagtgaaacagataatataaatcgcccgacatgaagtcgggcgaagagaatcaggagcccagacggtagttcggggactctttagtaatggtcacgtcgtgaacgtggctttcctgaatgcccgcaccgctgatacgtacaaactccgctttagtacgcagttcgtcgatagtaccacagccggtcaaacccatacaggagcgcaggccgcccatctgctggtgaatgatctctttcaggcgacctttataagctacgcgaccttcgataccttccggcaccagtttgtcggcagcgttatcgctctggaaataacggtcagaggaacctttggacatcgcgcccagggaacccataccacggtaagatttgtaagaacggccctggtagagttcgatttcacccggagattcttcagtacccgccagcatggaacctaccatcaccgcgcttgcgccagcggcgatagctttggcgatgtcgccggagaagcgaataccaccatctgcgataaccggaataccggtgccttccagggcttcaactgcgtcagcaacggcagtgatctgcggaacacctacgccagtaacgatacgagtcgtacagatagaaccagggccgataccgactttaaccgcgctgcaaccagcttctgccagagcgcgtgcacctgcagctgttgccacgttgccgccgatgatttgcagatccggatatttagcacgggtttcacggatacgctgcaaaacgccttctgagtgaccgtgggaggagtcgatcagcagaacgtcaacgccagcggcaaccagcgcgtcaacacgctcttcgttacccgcacctgcgccaactgcagcaccaacacgcagacggccttgctcgtctttacaggcgttcggtttacgttccgctttctggaaatctttcacggtgatcatgccgatcaggtggaattcgtcatcaaccaccagcgctttttcaacgcgtttttcgtgcatttttgccagcaccacttcacgggcttcaccttcacgcacggtgaccagacgctctttcggcgtcatgtaaacgctaaccggctggttcaggtcggtaacaaaacgcacgtcacgaccggtgataatccccaccagttcgttttcttcggtaacgaccggatagcccgcaaaaccgttacgctcggtcagttctttcacttcgcgcagcgtcgtggttggcagaacagtctgcggatcagtcaccacaccagattcgtgttttttcacacggcgaacttcttctgcctggcgttcaatggacatgtttttgtggataaaaccgataccgccttcctgagccagagcaatagccaggcgcgcttccgttacggtatccattgctgcggaaagcatagggatattcagacgaatagttttcgtcagctgggtgctgaggtcagcagtattcggcagaacggtagaatgagcaggaacgaggagaacgtcgtcaaacgtcagagcttctttagcgatacgtagcatgggcaatatctcgaccagagtggttaataaatattgccnnggcattatacagagcgtaaccgattgcatctacccctttttgcaaaaaatgcttgctatccccgaagggcgggttactatcgactgaataacctgctgatttanaatttgatctcgctcacatgttaccttctcaatcccctgcaatttttaccgttagtcgcctgaatcaaacggttcgtctgctgcttgagcatgagatgggacaggtttggatcagcggcgaaatctctaatttcacacaaccggcttccggtcactggtactttacactcaaagacgacaccgcccaggtacgctgcgcgatgttccgcaacagcaaccgccgggtgaccttccgcccacagcatgggcaacaagttttagttcgcgccaatattacgctctacnagccgcgcggcgactaccanataatcgttgagagtatgcagccggccggtgaagggctgctgcaacanaagtacgaacagctcaaagcgaagttgcaggctgaaggattgttcgatctgcaatacaaaaaaccacttccctcccctgcgcattgcgttggtgtgatcacctcaaaaaccggtgctgcgctacatgatattttgcatgtgttaaaacgtcgcgatccttctctgccggtgatcatctaccccaccgccgttcagggcgatgacgcgccggggcaaattgttcgcgccattgaactggcgaatcagtgcaatgagtgcgacgtgttgatcgttgggcgcggcggcggttcgctggaagatttatggagttttaacgacgaacgcgtagcgcgggcgatttttgccagccgcattccggtcgtcagcgccgtcgggcatgagacggatgtgaccattgccgattttgttgccgatctgcgtgcaccaacaccgtcggctgccgccgaagtggtgagccgtaatcagcaagagttactgcgccaggtgcaatcgacccgtcaacggctggagatggcgatggattattatctcgccaaccgcacacgtcgctttacgcaaattcatcaccgattacagcaacagcatccgcagctccggctggcacgccagcaaaccatgcttgaacgcctgcaaaaacggatgagctttgcgctggaaaatcaacttaagcgtgccgggcaacagcagcagcgattaacacagcggctgaatcagcaaaatccacagccgaagattcatcgcgcgcaaacgcgcattcagcaactggaatatcgtttagcagaaaccctgcgcgcacagcttagcgccacgcgtgaacgtttcggtaatgcagtaacgcacctcgaagccgtaagcccactgtcaacgctggcgcgtggatacagcgttactactgctactgacggcaaggtactgaaaaaagtgaagcaggttaaagcgggtgaaatgctaaccacacgtctggaagacggctgggtagaaagtgaagtaaaaaacatccagccggtaaaaaaatcgcgtaaaaaagtgcattaagccagcacgaattcaacgcnttttttcgatatcaagccatgcccgtgctgacagaagtaatctaccgcaccgcaggcttttaacacctgcaacggttgatggcagtccgggcaaagagctttcatttcaataactttcccgcangatgggcaatacgcatggccgttatcctgatcaagcacatgctgacattgtggacaatgcagttccatatgaattcctccggtagccacccctctacattcatagagggaatggcagataaaatacttacggataattatttatttttcttgatgtgcttcatcagacgcttacgtttacgcatctgggttggcgtcagggtgttacgcttgttcgcatacgggttttccccttctttgaactgaatacgaatcggcgatcccattacgtccagcgatttgcggaagtagttcatcaagtaacgcttgtaggaatcaggcaggtctttcacctgattaccgtgaatcaccacaatcggcggattataaccaccggcgtgtgcatatttcagcttcacacgacgaccgcgtaccagcggcggttggtgatcttcaacagccatcgtcatgatgcgcgtcagcatagaggtccccacacgacgggtggagctgtcatacgcttcacgtactgattcaaacaagttaccaacaccactgccgtgcaaggcagagataaagtgcacacgagcaaaatcgataaagcccagacggaagtccagcgtttctttcacctgctctttcacttcctgtctcaggccatcccacttattcaccacaatgacaagtgagcgcccactattgagaataaagcccagcagcgagagatcctgatcggaaataccttcgcgcgcatcaatcactaacatcaccacgttggcgtcttcaatggcctgcaacgttttgattacggagaatttctctacagcatcggtgattttgccgcgtttacgtacgccagcggtgtcaatgagcacatactcacgtccatcgcgttccattggaatgtagatactgtcacgcgtcgtaccaggcatgtcataaacaacaacgcgctcttcaccaagaatacggttagtgagtgtagacttacctacgttcggacgacccacaatcgccagtttgatcggcagactttgcgggtcgaagtcgtcttcctcttcttcttcgccgttctcttccgcttcaaattgcgcccagtattcagcgtcttcgtcgacttcctcttgcggtgcgagatcttccatccacggcagtagcacatgctccagcagacttaatacgccacgaccgtgagacgcggcgatcgggtagatttcacctaaaccaagcgagtagaaatcaaccactgcctgatcgggatccagaccgtcagttttgtttgccaccaggaaggtcggtttttcacgggagcgcagatgtttggcaatcgcttcatctgccggcatcaggcccgcgcgcgcatccaccataaacagtacgacgtccgcttcttcaatcgccagcagcgactgttccgccatgcgggtttctacaccgtcttctgtgccatcaatcccgccggtatcaatacagataaactcacggccttcaatttccgcacgaccgtacttacggtcacgagtcagacccgggaaatccgcaaccagcgcatctcgggtgcgagttagacggttaaataacgtggattttcctacgttagggcgcccgacaagcgcgaccacaggtaccatgtttaaagcctcatttttataaatcatcagacaacgcacgctatattcgcgtcgttgttaaaaacaggaaaacggcccctgtccaggagccgttttcaaagtgaacgacagagacgattaacgtgtaatagagtacacggttccgtcttttgcctggatcagcagtttgccgtcagcggcaaccggttcagtctggaaaccggaactatcaactttttgctgggcaacgaaacgaccatcttcgacgttaatccagtgcaaataaccttcactgtcaccgaccaccaggttgccattatacagcaccggagaagtcagcaggcgatgcagcagatcgctttgtgtccacagcgtaacgccgccatcaatggtcaacgccatcacccggtcattttgatcgaccagatagatgcgattgccgtcgacgatgaaatcattcaccgaacccagttcgcgtttccacataatctgaccactgcgcagatcaagcgccgtcaggttaccattataggccagcgcgaaaacaacgccgttaacaacgacgggagtcgtgtcaacatcgctcagacggtcaatttcggtagaaccggtcgcttgggaaatacgctgctgccaaatcatctggccctgttccatcagcactgcgctgacgcgaccattatcgccccccacgacggccgcaccaaaagccgttgccggcgcagactcgccacgcaaagagagcgaaggcatatcgaggttaactgtccatttgacagcgccgtcagcttcgttcagcgcttgtaactgaccgttactggtgtggattaacaccagaccgtcgctgaccaccgggcgcgaaagtgcttcacccgcgactttagtttgccatgccacagtaccatcgctggtattcagcgcgtaaacctgcgccttttcgctgccaatgtagacatgtccaccagacacggtcacaccgccagaaagtaatgcaggctctttagagaaccagccatctttctcggccaggctgacagaccagatttctttgccatcatccgcattcagcgcttttactaaaccagcgcggtccgctgcatagacaacgttgtccgccagtgccggatgaagattggaatagaagttgccaatgccgctaccaacggaagtgctccacgccgtggtcggcgtaaactggttttcaacggttggcaatggggacatctttaccacatcttcttcgctgttaaacagcgaacagccgcttaaaagggtaacggaaagcagtcctggcagcagtaatttacgcaattgcatcgggtccctctcagatggacaaattattaattttcatctgcatcatttcgctcagtgccggagtaacatcgcttttcacgcctgcttcccatgcactacgcgcaccttgcttatcacctttgctcagcaatgcttcaccacgcaggtcggcaacaatggcagcccacccttcacctttgatggtatcaagggttttcagcgcggcatcagcctgcttgagctgtacctgaacgcgagcaagacgcagatttatcacggctttgagattttcatcgctcgtgtctgccagcccctgttgtaactgggcggcagctttctctagttcatttttgtcaacaaattgctgcgcaagttccaaagaagccagcgcaccataagtatttttattttcagcagcaaatttttccgccgccgggatgctatccggtttgccttcgctcactgcggtaaccgcattttgataggcaagagaagcggagcgtgcanaatcaacctgatggctgttccagtagcgccagccaatcagtgcgccaacgcccaaaatcaccccaacagccagtgctttgccattttcagcaaaaaagcgtttaaccgcttctacctggtcgttttcgttctcgtaaatttccacgctgtccttctccttccttaacccagtaacgtgcgcaaatgcgcggctacgctatcctgcgcaactgccgtttgctcaccagagcgcaaatccttcactactgctgtgccgttagccacttcagactcacccagcaccacagcaacgcgggcaccccatttatcagcacgggcaaactgtttcttaaagttgccgccgccgtggttggtcatcaatttcacgcccggtaattcatcacgcagacgctcagctaatgccatagccgcagattgtgtatcagcacctgaagccaccaggtatatatcgacaacaggatcggctttaaattccggattaacggcctgtactaacaatacaagacgttcgaggcccatcgcaaaaccgacagccggtgttgcacggccgcccagttgttccacaagaccgtcataacgaccgcctgcacacacggtgccctgggagccgagactgttagtcacccactcgaaaacggtacggttgtagtaatccagaccacgcaccagacgctggtttacggtgtaagcgatccccgcgctctcaagcagtttgcacagaccggcaaaatgctcacgagattcctcgtccagataatcacctaatgccggagcgtcgttgagaagcgcctgcacttccggattttttgaatccagcacgcgcagcgggttagtgtacatgcggcgtttgcagtcttcgtccagcttttctttatgctgctcaaggaatgccaccagcgcatcgcggtaattggcgcgtgcttccagcgaaccgatagaattcagctcaagagttacgtgttcggaaatacccagcgcgcgccaccagcgggcggtgagcataatcagttcagcgtcgatatccggaccttgcagaccgaaaacttcgcagcccaactgatggaactgacgataacgccctttctgcggacgctcgtgacggaacatcggcccgatataccacagacgctgttcctgattgtacagaagaccatgctcgatgccggcgcgtacacagcccgccgtcccttcagggcgcagagtcaggctgtcgccattgcgatcctcaaaggtgtacatctctttttcaaccacgtcggtgacttcaccaatcgcacgtttgaatagcggggtctgctctacaatcggcaagcggatttcactgtaaccgtagctgccgagcacgtttttcagtgtgccttcaatgcgctgccagatggccgtttcgccaggcaggtaatcgttcatgccgcgaatggcttgaatgttttttgccacgtttattctctttctgaatataaaaatgaaccctcaacgcttccctcaatgtttcgggagccatgcgggttcaatcatacacgggaagcgaggcgcttcccatcacgttattatttttcaacctgctgaacgtcaattcgacgcgcttcgtccagctgactggctttcgcacgaatgcgtgcctccagctggtcgatcatatcgttgttgtccagacggtctttgcgcacgccatcttcatagagaccgcttttcttgttgccgccggtgacgccgagtgtagaaaccagcgcctcacccgggccattcaccacgcagccgataatcgaaacgtccatcggagtgatgatatcttccaggcgttgctccagcgcgttaactgtaccgataacatcaaattcctgacgcgaacaggtcggacaggcgatgaagttgatacctcgcgaacggatacgaagcgatttcaaaatatcgaaaccgactttgatctcttcgaccggatcggccgccagtgatacgcgcagcgtgtcgccgatgccttcagacagcagcagacctaaaccaatggcggattttactnnnccgntgcgcgcgccacccgcttcggtgatccccagatgcagcggctgatcgatttgttttgccagcaaacgataagactcaacagcgaggaagacgtcagacgctttcacgctgactttgaactgatcgaagttcaggcgatcgagatgatcaacatggcgcatggcggattccagcaacgcctgcggcgtcggttcgccatacttttcttgcagatctttttccagcgatccggcgttaacgccaatacggatcggaatgtttttatcgcgcgcacagtcaaccaccatgcgaatacgctcttcattaccgatattgccagggttaatacgcagacaatcgacgccgtattccgctactttcagcgcaatgcgatagtcgaagtggatgtcagccaccagcggcacgttaacctgctgttggatgagtttgaacgcttctgccgcgtccatcgtcggtacggagacacggacgatatcagcgccaacgcgttccagcgccttgatttgattgaccgttgcttcgacatctgtcgtacgcgtattggtcatggactgtacggcgatgggagcaccatcgccaatcggcacattcccaacgtaaatacgtgttgattttctacgttgaattggagcctggttatgcatgaaaaatctcccgcgttacccgtctgttactgcgccggtgattgttcggcattgagggtcagacgcgcaacctggttagttctgataaaacgactcagatcgacaggtttcccttgatactggatctgtactgcggctggcgcaccaattttcagtttgtacggtgcctggccggttaagttcaaattaccgtctttacgctgcataccgctaaacaattttttaccggtagcatcagtgacctccagccagcaatcggcagtaaagttcatcaccagcgcattcggatcagccaccggcgtggtcacgccagcctgatcggttggcaacggcgcagcaccatctggcgttgttgctgccgttggtgccggggtcgcggcggtatcaacatttgcctgcgaaggcgaaacaaccgcattctgttgcggatcaacagctggtgctggcgcagttacgacaggtgtttgcgtgttggttgcggtagtatccacagacgctggcggcgtggacgttgtagccgggtctgtagttgtcnacgtatttaacggaacactctgcccctgctcgctattactgctcagttccnccgaagattgatcggccatagtggtgatctcttcctgctgagctttgtggtcttgccaccaccaggcaccgctcaggccgataaccacaaacaacaccagccaggtgaaggtcatcagccagccgtcgcgttttttgcggcgtttaccgagggaaaaactctgcatcggcgcaacttttgcagcccgtagtggagcctgcttttccagccctggcagcagttcttcttctggaatatgtaccagacgcgcataagagcggatatatccgcgcaggaatgttgaagcaagatcggcgggtgccttatcttcttcaatgtcgcgtaccgtggaaaccttcaggcaaagtcgctcggcaacggcctgctgactaagtcctagttgttcgcgagcattacgcaggcgagcgccggtagtaagtgcttcattttggtcgtgcgtggcttcagtattcattcgctgcaggtacgtttaaatgagaattgagatgccggtgaaccatcatgctcacccacaccgcgaaacatccgttaagttaaccgttatcatacagtataagaccgtctgtgtgctcgtgacaaagcccacattcactaaggctaacttactgttgcatcgttacatactgccttaaagtcagcaaaaacgcaccgttaatattgaccagacaattgcaacttaatacttcattcataaaacattacgccacggtacataaagtaaccgtggcgtaatggctatcagaccgctttaatgtcgatggcttcaccctgcatccgtttacgcagggtacgtttcgtacggtcgataacatcgcccgccaactgaccacaggcagcatcgatatcatcaccacgcgttttacgcacaatagtggtgaaaccgtagctcatcagcacttttgagaaacggtcgatacggctgttcgagctgcgtccatacggcgcagccgggaacgggttccacgggatcaggttgatcttacacggcgtatctttcagcagttccgccagttggtgcgcgtgttcagtgccgtcgttaacgtggtcaagcatcacgtattcaatagtgactcggccctgattggcgttggatttctccagataacggcgcaccgcagcaaggaacgtttcganattgtncnttttgttgatcggcacaatttcgtcacgaatttcgtcgttcggcgcgtgcagggaaattgccagcgcaacatcgatcatatcgcccagtttatccagcgctggaactacaccggaagtggaaagcgtcacgcgacgtttagacagaccaaaaccgaaatcatcaagcatgatttccatcgccggaacgacgttgttcaggttgagcagcggctcgcccatgcccatcatcactacgttagtgattgggcgctgaccggtgacttttgctgcgccgacgattttcgccgcacgccacacctggccaataatttccgatacccgcaggttgcggttaaagccctgctgggcggtggaacagaatttacactccagcgcacaccccacctgcgaagagacgcagagcgtagcgcggtcgtcttccgggatgtacaccgtttcgacacgctggtcacccacggcaatcgcccatttaatggtgccgtcagatgaacgctgttcttcaaccacttccggtgcgcggatctccgccacctctttcagtttgccgcgcaacactttgttgatgtcggtcatctcatcaaaattgtcgcagcaatagtgatacatccacttcatcacctgatcggcgcggaagggtttttcacctaaatctttaaaaaactcccgcatctgctgacgattgagatccagcaggttgatttttccatctttggtggtgacgttttcaggtgtgactaattgttcagacatatgctattccggcctcgttattacacgttatggcccctggagggttgaaaaaagaaacgccccggtgagcggctgctcgtccgggggcgctgcattgtacaaattctggcgcacggatgccacgtttgcacgcggcatttacgaaattattaacgggtgcgcgggcacacttcgccttcgccgaagaaataagcgatttcgcgagcggcagattcgacggaatcagaaccgtgggtaccgttttcggtcaggctgtcagcgtaatcagcgcgcagagtaccggccagtgcgtttgccggattggtcgcgcccagcagatcgcggtgacgctgaacggcgttttcaccttccagcacggaaaccacgatcgggccagaggtcatgaattcaaccagaccatcaaagaacggttttccatcgtgttcagcataaaagccacgtgcctgttcaacggtcaggtgcagcattttggtgccgacaattttgaaccctgcagcttcaaagcgcgcaaagatattaccaatgacgttttttgctaccgcgttcggtttgataatggaaaaagtacgttcaatagccatttttacctctgtaaattgttctgttgttgtctgtaccagcgtacgagatggcgcggattataatgagcaacagagccgttgactattgatgaaggtaacatttttttaaaanaaaatgagttttagcaacaactcgacttttatggtgttctcatcccataacgatgacgttggcaataaagacaattttgcgcattttgctgaaaagtaagaaaggatttttgacaggttttacagactttgcgattagcatgaagattcacaatttttgccggtagaatcgtcaattcaacggtcattgcctgatgaaaacaaacagcaatacaattttggcatccgttacacaaggcatcatttatttgtaaatggccttcgttaagcgaaaagacctgttgctcgcaggcccgccagcatgcaccgcaaagctgacacttttgaggatccatcatcgggcgagcatcactaatctggggccataaataatgtaaccgacgtaatcctagttgtatttgtgtcatctgaacatccgcacgctgcacatggaacaaacgacgccgggaaacattcacctcactggtatgtggagataccacagaccagccttcctcgccatattgccgtaagcgttcgtttaacagcaataatgcgcgctcccatgccttcgcctgactcagatcaatcgcgatcgctgtgatcccctgctctttatgccatagcaaaagttcttccagcgtcggcgcaatagtggtgaaaggtgcgaccagggtgtgattgcgaaaataacgtaaaggggaattaacgccacgaatagcctcttgcggacaaataaactggcaaaccgcacactcaatacattgttccgcgtcgaccgctatgccctcttctgtcagcgttagcgcctgtgccgggcaagcctcgacacaggcatgacatgttgcaaaacgaaagcgttggcgcgcgcattccgcgccaatcgttatgttatgacttaacattagccgatactaaaaaagacaaaacgcagcataacttcactccccactagcattacgctaccgaataacgccgccgggatattctttttacaaccaccgacagcaaagaacatcatcccaatgacggaaattccccagcttagtgtcagtatgggttttaactgtcccagcatcgctaatggcgcatgtggcaatgtggctatctgcatcgcatttgccgttaaatcccctatccacaacggctgaaccaacaaacgcagcagaaccaggagagcgatcaccaacacgcatccattacgcagggcatcaatctgcggcaaaattccgctaatacgaaacactgctaccagcgctgaaccgagaattcccactgtacctaagaacataatcagcgtgttgtaatgctgccaggtgataatcgacgtatggatgtaaacttgcgccatgcagaaaacatcaacaatcccgaccactgccgctagcataagcaggagttgccagccgcctttgcgtaacatgaccagtaatgtggataaacccaatagcgccagatacagcgcaccaaagataatttcccgactcagccatgaactggaaaagtggctcagcgcatgcatcgcattaagtggataacccaagtgtaaggtagaaatcagtaaccctacggcacctgccaaaaaagccaacagtaatggcggccgcataaccgggcgggcgctggaggtgattaaaatatgacgatgaagaaacgccagccacaacgtcataccgaccgatgcctgtaacaacagcgtaaaagccattaacggtaattcatgcatgatgtgacgcctccttttccgcgccctgatgcggtttaatcaccagatttggctgcgtaatcgacgaatcaggtaaacctttcacatcactgacatcgccatacttttcacgcaactcatcaatagggccgaacttaatcgcccccaacgggcacgttgccacgcaaatgggttgttctcctttagcttgcagatcaatacagaaatcgcatttcgacatntgcccggtctgctcattcatttgtggtgcgccgtaaggacaggaccaggcgcagtaaccgcaaccgacgcacttatcagtattcacgcgcacaataccgtctccgggacgcttatgcatcgccatcgtcgggcaatttttggtacagatcggatccgcgcaatggttacaggaaacagaaagggtataagcaaagacattatgactcacaccgccctctccagtggcgatgaagccacctccgttcacttcatacacgcggcgaaaacgtcgcccaacctcaaggttgtttttgtctttacaggccacctgacacgctttacagcccgaacaacgcgaagagtcaataaagaaccctaattgtttgtcgctgacagatgcaaattctttaaattggctcatgctttctcaacctccaccagcattgtttgatgcgaattccctttcgccagcgccgtaatgcgggtcgaactcagtacattggcacagcctccgcgatcgataccttgtgcatccggttgccaccatgcccccgcctgcatagcaactacgccagggatgatacggggggttatttccaccgggataatgctcacaccacgatcgttataaatttttacgctatctccttcgctaatcccgctctgttttgcatcttgcggattcagccagagtttttgcgtctgaacttcttgcagccacgggttagcatactgggtggaattagcacggtttttccctttccaggtgatgagctgcaacgggtatttcgccgtcagtttatcttctggcccttcaaaggcagggacatagtgcgaaagcgcgggaatttctggatcttgcatatcaaaaagacgcttagagaagatctcaattttgccggaaggcgtcgggaaaggattattctgcggatcgcgaatatttgcttcgaaagcgatgtgcggcgcgcttttgaaaagatgtcgacgtgttttttgcagggttgcgaagtccggcaaattttcatccggcatcgccagacgagtttgctcccagatatgctcgatccattgcttctcatcacgtccttgactgaactcggcttcgacacccagttttttcgccacgtcacgcaaccagtcataatcggtgcgacgttcaaaatccggctcaatcagtttttctgacagaataagatagctcgcagttccccatgtttcgccgatattccagcgttccataaagctggtttccggcagcaacacatcggcatatttcgcgctcggagtcatgaacagatcgctgagtacgatgaattctattttagattcgtcttcaaggagcttcgcggcctggtggacgtccgggttctggttcgccagataattacctgccagtgagaacagcaggcggatattactgtcgagtttatcgacacctttaagcccatcttgcggcgtaactttagaagcatcatccgccgcctgcatccagttcataatcgagattttcgcttgtaccggattttctggcatatctggtccaacgcagaatttacgattagaactaccgccgtaacctgccgcccagccacctttgatgccgacgttaccggtaatcgaggccagtaaagttgaacctcgggcggtgcgttcgccgcaaatatgtcgctgtggcccccatccctgaatcaacgctgcgggttttgtagtggcgtaatcgcgtgccagttgacgaatggattgtgctggaacgtgggtaattttttctgcccattccggcgttttgtgtatcccatcttttgcgccaaaaaggtaggcaaccaacgattcgttggctggtacgccttccggcatggagttttcatcaaaaccgagagtatatgtgtcgataaatgtcttatcgtggagattctcgctgataatgacgtacatcatcgcgtccatcaacgcattgtccgtggtcggcaacagngggatccactgatcggcaagtgaagatacggtgtcggaatagcgcggatccaccacgataaaacgtgtaccgttttgcttcattttttgaaaatagtaattggtgtgaccgaatatggtttccgttgggttatgcccccagagaatcaccagtttggtatccagaagagtatccatcgagttaccgctcgcggccacgccatacgtgtaaggcgtggccgccgcagtattacccagactaactgagtgataatattcaagataaccaccggttaaatttaacagccgacgcgccatcgcatcgccagaaaatgttccaccanaaacagccgtcccgacatggacataacgtgaagctgggccatattgttgcgtgatccttttcaggttatcggcaattaaggtcgtcgcctcatcccatgagatacgctcaaatttaccctcgcctcgtttacctacccgcttcatcggatatttcaaacggtctggatgataaacaaatttacgatagccgcgaccacgaacacaggcgcgcataatcggcatttgtggatccaattcgttatcgggaagcgtggtaatttgcgtcaccacgccgtcgcgcatatgcgcccgaatatcgcacttaccaccgcagtcaaatgtgctacaggtgggcacgactttatcagctactggagctgtaacttctggcgacgcatctggggattgcgcctttgcggtagaagaaataaaaggcaaagtgataagcgcggaagtcgcttgtaaaaaactacgtcgtgatacttgcggaaatgtaatgcgttccttttcgtctggcgtatccatcttgcgttcccgaaaatgaaaaaataaatattcacgtatttattcgagaacaatgctgataacaatcaaataattagtcgtttgaaaaaacgtgagattattaaattattaatgcattccaaatataaataccataattagattaataaatattttgtatatttcactgaaatgaaaaatgtactgacgcgatttgccctacgtcatccatcaccagcaattgataatcacctttatccgtcaaatgcagggtcacgttgcgcccgcgttcagttaacggttcgccattcagaaaccaccagcgttcacctgcccctccacttgattgcaacggcaaagtcgcttccgctgcgcccggtaaacgtttaataatctcgccatcgcgaacgcctgtcagctgcagcgggagctgggcatcgtgaccgtatggcgggcaaattgtcgangccggtggtaagcgcacagcgcgacgttctgatgcgggcaaccagggttccagcggtagcggccagacatttatcatttcttgtcgcgcttgcgggcaatcagcggcaacacgtttgccattttcatccagccagatggggaaacgaatgccattaatgccttcctgctccggcagtaatananttggcggctgactcccgtccagcagccaggttgccaggcggcggcgacagttaccgtcaccttccggcaaanactgtccgcccggccagcaaataacgccacgagtgactgagttcgggcgcgggtcttccggcagattagcactgcgcgacagtaagatattattgacctgattcaacaatggtacggcgctggcaaaaccaaactgaccaacaacgggcgtgccgtccggtctgccagtccagatcccaatgacatagcgagcgttaaccccaatcgcccaggcgtcacgatagccatagctggtgcccgttttccatgccagtggggcgacgcgcggcaaggcaccatccggcaagggtagcgcttcatcagccataatccggcgaatgatccacgccgctcccgacgacattaaaggccgttcaagcagcggatcgtcaggctgtaagcgcaatttgcctgccttgccgtggcgagcaaacgcggtatacgctgccgccatatcttccagtttcgcaccagcgccgccgagaatgagcgaaagattcggcgcagcaccgttgggcaaatataacggnaatccaacattgcgtaactttgccgcaaaccgtttcggtccataggcttccagcacctgcacagcaggtaaattcagcgagcgcaccagcgcctcgctcatgctgatcgggccatgaaaaccgctgtcaaagttgccaggtcggtaatcaccggtacgccgggggacgtcttgcagcagtgatgccgggtggatcaatccttcatccagcgccagaccgtaaacaaacggtttgagcaccgatcctggcgatcggatcgcattgaccatatcaacatgaccaaagcgtgaatcatcgttgagatcaaccgaacccacccagccgcgaacacgcatatcggtatgatcaaccacgatcatcgccagtgagctgcgcggtggtaatcgtcctttccagttttgcgccagttcttccagacgtcgttgaagaccggcatccagcgtagtaacgattttgtcgcttttgcttttaccgagcatcatgcgcgaaaacagcggtgccagttgcggcatttgtcggggtgccagccagatgggttcttcccttgactcttttacctgctcacgggaccacacaccttgcacggccatccgttcgagcactttattacgcgcgacttcggcacgctccggccaacgatccgggcgaagacggctgggcgcttgcggcaaaaccgccagcattgccgcctcggaatagcttaaattcgcaggcgactttccgagataagcccaacttgccgcaccgatcccctgcaacgtaccgccaaacggagcgcggttaagatacaaggtcagaatttcacgcttagacagatgccattccagttgcaacncgcgccagagctggcgaattttgccgccaaatgttttggggtgaggatcaagcagacgagcaacctgcatagtgagcgtgctgccaccggaaataacccgtcccgaagtgagatcttgccatgctgcgcgcgccaccgagaatggattcaccccaggatgcttccagaaccagcgatcttcataattgatcagcgcttcaaggtaacgtggagaaacatcttcgattgttacaggataacgccagatgccgtcagcatcggcgaagcgccagagcggcgtaccatcctgcgccacgaccactcgtgcgggattgacttcatgcagcggtagaggccagagtttatctgctccccacgctgcaagaaaaaggagaaatggcgcagctgccagcgttatccagcagccgcgtttggttaacaagcgaggcatttacggtctgacaatcagcaaatcttcagccgcgccggtcgcccgccattggggaacatacattgattccaccatcggttgcggtacctgatacgttcccggcgtcaccgcccgcgccagatacaccagcgttaccggttggtattcatcaacggcaaccgccgccacaaagcgatcgtcacggaactcaatgtgcttaatactcgcctgctgcatctggttcagtaagttctgcacttcgccaccactttgctccaggctggcgctaccgttcgccagattctggttttccagttccagacccgcaggcagcagatccacgactaacgcatccggcacgctgttactagcttttacctgcaaccagaccagcaccagatcgccgctacgtaacgagtccagcgatttgctcttaccatcagtaccaagaatatgacgctcaatttgcagcacattgttcgccggtaaaggtgcggattgcggataaccgctggcatccacacgcagccataacggctgctcgccactgttggtcacctgcaaggtggcaagttgatcgctattcagattgctgttttgcgctttctcgcctgtcagcggctcagctgagaaagaggtttgcgcctgccatttacctggtaaatcctgaatcgtacgggcagccaggaacaacgcgttactttcctgcgtcgatagccagcgttcaccaaacgcctgctgcgaaagtgtgttcagcagggagtactgctcatcgggtagcagtttgttctcttccagcaaggagagcatcaacgcgttgtcgcgcagtggactaccgtaatcacccagccatatccgctcatcactattacgcggcgtttttagcgccagcgcaatcgcttcttcatcacgcgtcgcatcacccatggttttcagcgcaacgccaagttgcagcagcggtaaaccagaagcggcatctgcacgatgctcccagatttcacgcagcgcacccagcggagccttttgctgacgggccaacaccagcgcagcgtaagactgtacggcgaatttactggctttgagattatccgcgtacgggatcgacatcatgcccggatcttgtaaatagcgcagcagacgctcattaccccggttaatggcgtctgtcggcacgctgtaaccctgttcgcctgcgcggaccaggaaatccatcacgtaagccgtcagccagtactcttcgtcaccgtttttatcccacagcgcaaagccgccgttatcacgttgcatttgcagcaaacgggaaatgccgatatcgaccgatgcacggcgtttctcatcactgtcgcctttgatgcccaacgcctgcagttgggctgcgttggtataaagtgacgggaacaggccgctggcggtttgctcaagacagccgtacggatacgcttttaactctttgatataacgtgcgatgttcagcggtggtttgccgctcaacaacaattgcccttccagcgtaacaggcgagaagttttgcaatccatccgccggaatcgcccatgtctcaccaggctgtaacgccgtaccgtaattaaccgtttgtgccgggaacgccggacggacgccgattttccactgcttatgctgatcggcaacggtttcacccggtaacgctaacccgctaatggtggcctgaatttctccatcgccataacccggcaatgctcgcaccgggataaacagcgtagtacgcacacctggcgctaattcaacggctgcgggtgaatcgctgaccagttcaagcaaaccactggcggtcagggcaacgttcagtttttgcggtttatcggtaagattagtgatatccagcgtcagacgcgagttatcgccactcgccataaagcgcggcatgttcagttcagcaatcaccggtgcggcaactatcactttgctttcgttgctaccgaattcatctgccgtccaggcttgcgccatgacgcgcaattcaccgttaaaatcgccaatcggcagtgtaaccgagccttcgccctgttcgttgagcgttaccggcagcgcctgctgcgcgacaatattgacgtgattgaccggcggtttaccaccacgtttcagctcatcaccatcgccaccgaaacgcagagctgccagacgcccctgaccttcaataacctgaccgtaaatatcgtaaatgtctgcgccatagcgtttctgaccaaagaacgcctgccacggatctggcgtgacgtagtcagtaatattcagcacaccactatcaacggcagacaccagcacattcacctgtttaggcttctcgccatttttagtgctggctttaattttcacggttaatggttgattgggacgcatttttgctggtgtttccagcgccagatcgaggcgacggttttcatcaccaagcggcagatgcaacacaccaaccgcgcgttttggcgtcgcggagcgagatttatcgccaggacgcaccaccagcgtactcaaataaagatcatgacgattccaggttttatcgaccggaatcgtcagatccagcccttgagccggaacatcaatctcttgccaccacagcggcccttcactggactcgaccatcgcataacctttacccgccgttggcgcggcgatatgcaacttaatggtatcgccagggcgataaccggctttatccagtttcagcgtgacacggtcgggtcgcactgcgccgctaccgtcgctattatcctgccagctatagccagcccaaaaacgaacactactgaccgcttcattcggcgctttgacttccagacgataagcgccccactctaccgggaaactgaccttgccggtttcgtccgctttcagatccagagtttgttcattttcaatcagatctttttgatcaaactgtgattgccagccttcatcttctgaccagttccagtagtaatcgcggcgttcgcgaatcaggcgcacctgcaagcccgacacggcttttttcacgccttgcgcatcgctataaacgatgtcaaaagcggcgttactgccttcatcaacaatgggctgtttcaccgtgctgtcagtgcgataatcgtaaaccgatttcgaggcgaactgcggacggatccccggcaatgcatcggcaggccagatagcctgctcagcgcggcgcgtcaccgggcgaccgcccgattccagcaaactgccctggaaaataacctgcaatggggaatgcgtttccttccactggctttctgtagaaacttcgccgcgccctttatcatccagcgtcaactgaacttcatccagcgtgcgggaaaggttttcggcagctatatcgccgaattcaaaaccaggtaaggctgacacagcctcacgcagtgggcgcaggaaaagttgcccttgcaaagtattaccattagcaggcgcaccgtacaggtagtatcccaccacggagaatttcacttcatcattcggcgtaagcggggttttctcaccggtcagattcagcgccatacgctctggcataaaatcttcgacgtggaaatcccacatccgatactggttatcgcccgtgttagcgcgaatatgccacataccggttgccgcattgctatcgagtggccaggtaaagtggtagaggccattttccggctgactaacgacgctcctgagtacctgcccatcgggtttaatcacgtctaacttgatgggttgattgggcaacgctttaccgtctgcatcacgcagcaaaccattgaggattaccgtttcacccgggcgataaagatcgcgcgggccaaacatgaaaaactgtttgctatagcctgnnnngccagcaatgttaaattctgctaagtccagcgccggaagttttaaatcgagtagcgttgtctgaccgtctttacgtgccagcaataatgcggcgtttttatcattttccagctgcacatgcccctgagcgtcactggttgcctgagtcagagtctgccctttctcatttaataaagagacttcaattccttgctgggccgcgccgttttccagactttgggtaaagatatccagacgattgtgataacggtgagctgaaacgccgatatcacttaacgtaaacagcgtcgcgggattactgtaatcgtaacgtccagcctgattcatcacagccagatacacgcccgcctgctgaagcggtttgatatcgcccagcggcagcaataatttttcacgggtgttacgcgcaggattgagatcaaaccgtccggtgtagaccagatccgccatctgcagcagtttgtctgactgccagttcgccagcgaattgcggtattcccattggctaatgaatgctggcagagattctggcttaacgcggaagaagttaacatcgacattattaacgttgagcgccattaccggcagcccttcaacgactttaccaggcagcagcgaaccacggctggcaaaaccgacactgggttggatgtcgcgggtagttatagttttttcgtaatcttttctgaaggttgcgttgttgagtgctttgacctccttgccaattgtaacgatcaaatcacgtttcggttcgaggtggcgtaaacgcagctctttaagattatctgatagctcccaggcaccatccactttgccgctttttttatcgacgacatgaataacgcgtgagaaatcctgatccgggtcgagagggatggagaacgtcagcaccagcgtggctgcaccatcaagttggacttcagagagatccagcaatgtcagcgccttaccggcactctgttgggccagtttttgtcgctctggcgcggagagttttgctgaactcgcgttttctgaagaggccgctttagtaacttcagaaggcgcatcttttttcaccgctgttggcgcgttatcgttgttgtcgcaccctgccagcgccagcattagcatgcaggcggctacgcgtaactttttcatttttcatccctgccacaatggcccgttagcaacgtcgaataattattatgcgtgagaatttacgttatgtaattcagtatcacgcccatacaatccgaattttagtgagaattgtggctcagacagccaaatcagcctcttttgcttgtcgcttttcactaaacatccgacaatttagcctaaccccggcaaaaatggagatgcctatgtccacgacatggtttgtaggagccgactggctcgccgaacatattgatgacccggaaattcagattatcgatgcccgcatggcgtcgcctggacaggaagatcgtaacgttgctcaggagtatctgaatggacatattcccggcgcagtgttttttgatatcgaagcgctttctgatcacacttccccgcttccgcacatgctgccgcgcccggaaacgttcgccgtggcgatgcgtgaattaggcgttaaccaggataagcacctgattgtctatgacgaaggtaatcttttctcagccccacgagcatggtggatgctgcgcacctttggtgtagagaaagtgtcgattctggggggtggacttgcaggctggcagcgcgatgatctgttgttagaagaaggtgcagtagagctgccggaaggagagtttaacgccgcgtttaatcctgaagcagtggtgaaagtaaccgatgtgttattggcaagccatgaaaatacggcncaaattattgatgcccgcccggctgcacgttttaacgcagaagttgatgaacctcgcccaggtttacgtcgcggacatattcccggtgcattgaacgttccgtggacggaactggtgcgcgaaggcgaactaaaaacgaccgatgaactggatgcgatattttttggtcgcggcgtcagctatgacaaaccaattatcgtcagctgcggctctggtgtaacagcagccgtggttttgttggcactcgcgacgctggatgtgccaaacgtgaaactgtacgacggcgcatggagtgaatggggcgcgcgggcagatttaccggttgagccattgaaataagctttttacaggcaataaaaaaccgccgaatttggnggttttttattgctggtctggttcgcggcctttccagcaggttgacttgtgttgccggagcaacgcaggcaccccacagtgttgaaatactctcttttatgcctggctgtgtcaagataataaacagagtaattattcaaacatgagagtattattcttaatggcccttttcgccgtctcgcaaacgggcgctggctttaggaaagaatgttccatgaccgtaaatacaggcaccccacagtgcttgctatcgcggcaatatcgccagtggtgctgtcgtgatgcggtcttcgcatggaccgcacaatgaagatacggtgcttctgtatcgtacttattgtttctggtgcgctgttaaccgaggtaaataataaccggagtctctccggcgacaatttactggtgattaacaaccttcagagcagcaggtaagcccgaatgccgccctttggggcggcatattttagattatccgattctgtttaaagtcacgcaaaaaaccaccccagcgacgttcatagaatggcgcaatatgttcggtaataaagtggctaattcctttttccccttttttcacctgacaaatatcgattggttcatcgccaggtaatgtatcggtcgctacacttcccgccacctgaataatttcttcgatatcaccatcggcttcaatgccaataagtaaattaggctgtgcctcttcgttctctttaattgaacaaataaaagcacgcttcacaggcttaatggttttaaataaggtggtgagtgaatcaatcatttgtgctggcggctctgcgacttccgataatatcagcgattcaccgccttccaggatttcctggctgctcagcggatttccctcttcaccaatcaacaaactgatttcacgcggcataaattctttaccggtcggcagtttggcattaaggaagagcgtttcgccaagggtcatctcaaacaatgtgcgaacgggcattacgacaaatgcctgttcgtcttcaaccgcctgttgaagtgcttctaacgaggtaaaaaaaggaatgacgctggtgccgtcttctttttcccagtgctgtaaatcaagcgcgctatcttcaaccacagcctcgccctgcgccgccgaaccaggcacccagacggtggattccagtagagtacggaaaaaggccgggcggtgcgccggttcggttgctgctttttccagcaggtcttcaagttcattttttgtttcggacataagaaccacaattcattcaacgttcggggcacaagtgcctgatgcgccatacttatcaggcctacaagggattcacaatttgttgaatttgcaatactttgtaggccggataaggcgtttacgccgcatccggcatattagtttacgccgttaacagattagcaatcgtgcgcacaccaagtcccgtagcacccgcagaccactgttcaaccggcgctttacggtaagtcgccgagcagtcgatatgcagccagccttgctgatagttctcaacaaagtgcgacaggaagcccgctgccgtgctcgcgcctgccggatacgccgcgcttccggtattgttcagttcggcaaagttagacggcagctggctgcggtggaattccgccagcggcagacgccagaatggttcgttctcttgtgaggcactcgccagcaaacgaccggcaagcgcatcgtcaaaactgaacagcgcgtgataatcattacccagcgcagttttcgccgccccggtgagggtcgccgcatcaatgatcatttccggtttctgcgcactggcatcaatcagaccatcggcaagcaccaggcgcccttcggcatcagtgttcatcacttcaacttttttaccgttgcgataagtgatgatatcgcccagcttgaacgcattgccgctaatcaggttatccgcacagcagaggaacagcttcacgcgcttgttcagtccgcgcgtaatggcaaatgccagcgccccggtaaccgttgccgcgccgcccatgtccgacttcatcgagtccataaacgcagtctgtttgatgctgtagccgccggagtcaaaagtgatacctttacctaccaggcacgcgtacactggcgcttctttatcgccagttgggttgtaatccagcgccagcaataccggagaacgttctgaaccgcgtccgacggtgtgcagccccatataaccttgctcacgcagatcttcgcctttggtgatccgataagtcacacgatcgctcgcgacgttgctgatcagatcaacagcacgctgtgccagttgcgatggtcccaattcttctgccggtgcgttgatggtgtcacgcacccagtcgatgatcatcaggcggttatccagttcctggcgctgggcatcgtccagatccggccactccactttacgcgtgcctttcggggctttgtaaccttgccagaatgcccagcatcgatccgcatcccagccttcaccgcttaactgaacatgcttgatgcccagaccgtcaatcttgcgcgccgcacgctggatcagccccagatcgtctgccccgttcaaatgcagggtaatgccgtcattattaatgctgtaagttgctttttctccccagcgcgcgtcggcaggttgggtaganagggtaatcttcatcgcttctgtcattttagttatccttctttgtaaaagggccgccagttggcagccccaggatttttccgctaaatgattcgcgttgcaggaaggcggcaagtgagtgaagccccaggagcatagataactatgtgactggggtgaacgagcgcagccaacgcatctgcggcgtgaagcatgacgcggaaattattcggcctcgtccagccagactaacaaaatcgcttcgaggattttctcgttggatgcctgcgggtcgtcgtcgaaatcttccagatcgcaaatccactgatgcatatcggtgaatcgaaccgttttcggatcaagatcgggatacgcatcgtacagtgcttcgccaatttcgcggctatcggtccacttaagtcccatactaacctctgttaatgctcacgcgcatggttgatcgtgtaacgcgggatttcgaccactaaatcttcgtcggtgacgcgcgcctggcagcttaaacggctttccggctccagtccccaggctttgtccagcatgtcgtcttcctgctctgagctttctggaagcgagtcaaaaccttcacgaacgatgcagtggcaggtggtgcaagcacaggatttttcacaggcgtgttcaatctcgataccgttacgcagagctgcgtcgagaatggtttcaccgctattagcttccagaacagcgccatcagggcagagatcctgatgaggcaaaataacaatctttggcatattaaacctcgtccacggaatggcctttcagcgcacgacgaaccgactggtccatgcggcgagcggcgaaatcctgggtttgtttgtctacgtttttaatcgcttgttcgatggcgtcaacgtcatcgccctgcgccacttcactcaggtgagcggcagcatcgtcaatgacctgacgttctgcggcgcttaacagcgcggcatcagcagccagcgcgccgtgcagactttccagcacacgcgccgcttctactttttgttctgccagcattcgggcttttacgtcctgctcggcatagctcattgagtctttgatcatcgaagcgatttcgctatcggtcagaccgtaagacggtttgacctgaatagacgcctcaacgccggtggatttctccatcgccgtcacgctcaaaagaccgtcggcatcgacctggaacgtcacgcgaatatgcgcaccgccagccggtagcgccggaataccacgcagcgcaaaacgcgccagtgagcggcagtcctgcaccagttcgcgctcaccctgcattacatggatagacatcgccgtctgaccatctttaaaggtggtgaaatcctgagcgcgggccactggaatagtggtattacgcggaatcactttctccaccaggccgcccatcgtttcgaggcccagcgacagtgggatcacatcaagcaacagcatttcgctgtctggcttgttacccaccagaatatccgcctgaatcgccgcgccaatagcgacgactttatccgggtcgatggaagtcagcggtggacgaccgaaaaattcgcctacccgttcacgcaccagcggcacgcgagtagaaccgcccaccatcaccacttccagcacttcatcagcttctacacccgcgtctttcagcgcgcgacgacaagccaataaggttcgttttaccagtggcgcgatcagttcattgaattgttcacggctgatttcgccctgccagcccgcaacgttaacggtcacagagtccgcatcgctcagcgcgattttggctgcaatggcggcatccagcagttcacgctgaacgcggttatcgctacgatcaggaatgcccgcctgctcgcgaatgtaatccgccagcagatggtcgaaatcatcgccgccgagcgcggaatcaccgccgattgccagcacttcaaacacgccgcnacttaagcgcagaatggaaatatcaaacgtcccgccaccgaggtcataaacggcgatcacgccttcctgaccggaatccagcccgtaggcgatagccgcagcggtcggttcgttaagtaagcgcaggacgtgaaggcccgccagnngnnncgcgtctttggtgccctgacgctgggcatcgtcaaagtacgccggaacggtgataactacaccatccagctcgcctgccagggcttcagttgcccgcgccgccagtgctttgaggatgtccgcagaaacgcgcaccgggttcagcagccccgccgccgtttcaatcatcggcaggccgttttcgctggcctggaattgataaggcagatgcggatagcgttgctggatatcagccagcgagcgtcccatcaggcgtttaacagaactaattgtgttggcggtatcgagcgctgcattagtacgcgcgtcataacccaccgaatgcccttgctgttgatagtgaacaacagatggcagcaggtgacggccttcatggtcggctaacgtttcggcctgaccgctgcgcactgtcgccaccagcgagttggttgtgcccaggtcaataccggccgccagacgacgctgatgcggcgcagcactcaaaccaggttcactaatttgtaataaggccatgtttagcttccagaaattaaaaatcgagcagnttttcttcgagttgttcggnactgcttcgcagtttatcgagaaaacgcagcttacgcacggtatccgccnccgcgtcccaggtctcgttgtctaactgttcaaccatcaactgatggcgggtatcaaacatctttttcacacgtttgataaagctttccagccgcgcttcatctttcgcctgttcgatctcgtccagctcttcgcgcagctccaactgttccatcaggaacgcggtgtcgcgcacagtatgctgctcgctggcgagatcaaagccgtgcaaagaaagcaaatattccgcgcgcattaacggatgacgcagcgtttgccaggcctgattaatggttgcagattgctgtacggcggcgagttgttccgcctggcttccgctggcgaatttatcaggatgatactgacgttgtagatcctgaaaacgcaggctcagcgcctgggtatcgagttgataacgggcaggcaagccaaagagggtgaagtaatccataacattctcagggctgcgatccgccgcgataacggcgaatcaggtaaaacaaaccccacgcgcaggcgaccacggtggggttatcggtatgcgcatcaaacgtggaagctttcgccgcaaccacactcatctttaacgttcgggttggtgaatttaaacccttcgttcaggccttcttttacgaagtccagctgcgtaccgtccagaaattgcaggcttttgccatcgaccacgactttcacgcctttgtcttcaaacacgatgtcttccggcgtcggttcgtcaacaaattccagtacataagccatacctgaacatccggaggttctcacgcccagacgtaggccaaaccctttgccacggttagccagaaaggtatttactcgcgctgctgcactgtcgctaagtgtaatcgacataaccaaacctcaactcttattttgcttcacgtttgcttttatagtccgcaatggcggctttgatcgcgtcttctgccagaatagaacagtgaattttcaccggcggcagttcaagttcttcagcaatatcggtgtttttgatagcctgcgcttcgtcgagagacttccctttcacccattcggtgaccagggagctggaagcgatagcagaaccgcagccgtaagtttt

SEQ ID NO: 1370 - DNA, 41277 bp, Escherichia coli
  Strain O55:H7
  modified_base (193)..(193): a, c, g or t
  modified_base (4259)..(4262): a, c, g or t
  modified_base (6311)..(6311): a, c, g or t
  modified_base (7080)..(7080): a, c, g or t
  modified_base (7702)..(7702): a, c, g or t
  modified_base (10486)..(10486): a, c, g or t
  modified_base (18544)..(18544): a, c, g or t
  modified_base (18763)..(18763): a, c, g or t
  modified_base (18789)..(18789): a, c, g or t
  modified_base (18829)..(18829): a, c, g or t
  modified_base (21826)..(21826): a, c, g or t
  modified_base (21864)..(21864): a, c, g or t
  modified_base (26863)..(26863): a, c, g or t
  modified_base (31536)..(31536): a, c, g or t
  modified_base (34611)..(34611): a, c, g or t
  modified_base (40316)..(40316): a, c, g or t
  modified_base (41050)..(41053): a, c, g or t
cgcgtcttcaatgataccttcatcgttgactttaatctgcaacttcattacgtcgccacaggccggtgcacccaccatgccgctgccgacgttctcgtcgttgttgtcaaaggaacccacgttacgcggattctcgtaatggtcgataactttttcgctgtaagccattataaattctcctgattccgatacngattaatgatgagcccattcgatgctgttcagatccacgccctgcttgtacatttcccacagcggagaaaggtcacgcagacgaccgatggatttacgaactaactcgatggtgtagtcgatctcttcttcagtagtaaaacgacctaaagagaaacggatagagctatgtgccagctcgtcgttcagccccagcgcgcgcagcacgtaggacggttcgaggcttgctgacgtacaggcggaaccggaagaaaccgcgagatctttcagcgccataatcagcgactcaccttcaacgtagttgaagctgacgttgagaatgttcggcgcaccgtgttccaggtcaccgttcaggtaaacttcttcgatatctttgatgccgttccacagacggttacgcaggccgcgcagacgttccatctcggtcgccatctcttcttttgcgatgcgataggcttcgcccattccgacgatctggtgaacaggcagagtgccggaacgcataccgcgctcgtgaccgccgccgtgcatttgcgcttcgatgcgtacgcgcggtttacgacgcacatacagcgcaccgatacctttcgggccatagattttgtgaccggagaaagacatcaggtcaactttcaactggctcaggtcgataggcagtttgcccacgctctgggttgcatcaacgtgatagataatgccacgagcacggcacatttcgccgatagccgcgatatcctgcaccacgccgatttcgttatttacgtgcatgatagaaacaaggatggtgtcgtcacgcatcgctgcttcgagttctttcaggtcgataataccgttacgctgcggtgcgaggtaggtgacttcgaaaccttcgcgctccagctgacggcaggtatccaataccgctttgtgttcggttttgctggtgattatgtgcttgccttttttctgataaaagttggctgcacctttgatcgccaggttgtcagactcggttgcaccagaggtaaagacgatttcacgcggatcagcgccgaccagatcggcaatctgattacgggcgatatctaccgcttcttcagcctgccagccgaaacggtgagaacgggaggccgggttaccaaaggttccgtccatcgtcataaactgcatcattttctcggcaacacgcgggtccaccggcgtggttgcggagtagtcgagataaatcggtaatttcattgctctataaactccgtacatcactcaatgcaaggaaccaggctaccggctagatgtacgaccgtgtttacggagcgcgatacgccccggcctgattctgaatactttttattaagcgcgtaacttaacgtcgatcgcgtcttgtgtgcgggtgcgtggcgcgtcgtgagtatgctgacgaccagacacatccagcacttcctggttgttaaccagttcgcctaaagtaatgttattgagaaaaccggtaagacggtcgctcaaatcacgccacagcgcgtgggtcaggcatttatcgccgccctggcagccgcctttaccctgacaacgggtggcatctacagattcgtcaacggcgctaatcacttcgccaacggcgatgctgctggcatctttgcctaacagataaccaccgcctggtccacgtacgctggaaaccagaccatttttacgcagacgagaaaacagttgttccagataagaaagggaaattccctgacgttcggaaatatcagccaacggtaccgggcccgcttcagagttgagcgcaacgtcaagcattgcggtcacggcatagcgccctttagatgtcagtctcatgtcttacttcacctcaaactcgcccctgcccggggttttttattgtaaaagtgggggtattgcatagcagggtcaagtctgacattcccgagtaaattggtcaactatttacttgactgatttagtcgggtatttaaccttcagtgccatttttttatcgtggcgtttgtacctgttatccttccagaccatgggcgggttgagggcaattattcgcattagcgcaggcctgttcccctcaccctaaccctctccccgaaggggcgaggggaccgtccgtgcacttatctggcttagccctcaggccttattacctttattctgctgctctatagaagccagaatcccgcgcaggatattcaattcctggctttccgggcgcgcacgggtaaacagacggcgcaatttattcatcacctgccccggatggttttcacggataaaaccggttgccagcagcgtttgttccagatgaccataaaaacgctccagatcatcgaccagcggatacggcgtctcttcatgctcgacctgctcgccattttcctgagttgccagccaggccatacgcacttcataggcaataacctgaaccgccatcgccaggttcagcgagctgtattcagggttagcggcaatcgcgacatgataatgacacttctgcaactcttcattggtcaggccgacacgttcgcgaccaaacaccagcgccaccggggtatttgccgcttcagcaacgcttttcagaccgcattcgcgcgggtcgagcatcggccacggcagcgtgcgggaacgtgcgctggtgcccaccaccaggctacaaccggctaacgcttcgtcgagcgtatcgacgatgtgagcattaccaatcacatcgctggcccccgccgccagggcaatcgcctgggagtcaggtttcaccagtggattaaccagccacagattggttaatcccattgttttcatggcacgggcaacagaacccatattgccggtgtgtgacgtctccaccagcacaattcgaatattttgcagcattgtctttcttcgtctaaagattattcgcgcatcttatcataaaacgaagacagatgccgatctcgctgctatactctgcgccgttttcccgttctttaacatccagtgagagagaccgatgcatccgatgctgaacatcgccgtgcgcgcagcgcgcaaggcgggtaatttgattgccaaaaactatgaaaccccggacgctgtagaagcgagccagaaaggcagtaacgacttcgtgaccaacgtagataaagctgccgaagcggtgattatcgacacgattcgtaaatcttacccacagcacaccatcatcaccgaagaaagcggtgaacttgaaggtactgatcaggatgttcaatgggttatcgatccactggatggcactaccaactttatcaaacgtctgccgcacttcgcggtatctatcgccgttcgtatcaaaggccgcaccgaagttgctgtggtatacgatcctatgcgtaacgaactgttcaccgccactcgcggtcagggcgcacagctgaacggctaccgtctgcgcggcagcaccgctcgcgatctcgacggtactattctggcgaccggcttcccgttcaaagcaaaacagtacgccactacctacatcaacatcgtcggcaaactgttcaacgaatgtgcagacttccgtcgtaccggttctgcggcgctggatctggcttacgtcgctgcgggtcgtgttgacggtttctttgaaatcggtctacgcccgtgggacttcgctgcaggcgagctgcttgttcgtgaagcgggcggcatcgtcagcgacttcaccggtggtcataactatatgctgaccggtaacatcgttgctggtaacccgcgtgttgttaaagccatgctggcgaacatgcgtgacgagttaagtgacgctctgaagcgttaatgactcaggcgggtgatatcactcacccgccctcgcctttcaggcgctattccgaaatacttcctcaccgctttactttctttcgtcactctcccaccatctttccccgattaatggatgataaagaagtcgcaaggaaaggttatggcactgccagtgaacaaacgcgttcccaaaattctgtttattctctttgttgttgccttctgcgtttatttagtgccgcgcgttgccatcaacttcttctattatcctgacgataaaatttacggtcccgacccctagtcgnnnnaatccgtcgaatttacggctaaggacggtactcgtctgcaaggctggtttattccttcttcgacgggccctgctgacaacgccatcgcaaccatcattcatgctcacggcaatgccggaaatatgtccgcccactggccgctggtcagttggttacccgagcgtaatttcaacgtttttatgtttgattatcgcgggtttggtaaatcaaaaggcacgccgtcccaggccggattgctggacgatacgcaaagcgccatcaatgtggtgcgccatcgcagtgatgtaaacccacaacggctggtgctgttcgggcagagtattggcggggcgaatattcttgctgttattggtcagggtgatcgtgaaggcatacgtgcggtgatcctcgactccacatttgcctcttatgcaaccatcgccaaccagatgatccccggcagtggctacttacttgatgagagttacagcggcgaaaattatatcgccagcgtcagcccgatcccgcttttactcattcacggtaaagctgatcacgttatcccatggcagcacagcgaaaagttgtatagcctggcaaaagagccaaaacggttgatcctaatcccggatggcgaacacattgatgctttttccgatcgtcacggcgacgtttatcgcgaacagatggtgaactttatccttagcgcgttgaatccgcagaactaacccatgatcgctagcacgataatcattcacaaaatcaccttaagacatgctaatccactggtcaggacagtttaagatgagaaaaattctgtgacgcttgccaacatttctgatgattagcattcccttcgccatttccctgagcaaactttagctattcttatcaattatgcttatgggagatctacagatgatgcctacgcttgctccaccatctgtcctttcggctccccagcgccgctgccagatcttgctgacgctctttcagccggggttgaccgccaccatggcaaccttcagcgagcttaatggtgtggatgatgatattgccagtcttgatatcagcgaaacaggacgggagatcctgcgctatcatcaactcacactgacgactggttatgacggtagctaccgggttgaaggtacagtgcttaaccaacgtttgtgtttatttcactggctacgacgtggtttccgtctgtgtccgtcatttattaccagccaattcacccccgccctgaagagtgaactgaagcggcgcggaattgcgcgtaacttttacgacgataccaatctacaagcgttagtgaatctctgctcccgacggctgcaaaaacgctttgaatcgcgcgatattcatttcctgtgtctgtatctgcaatattgtttgctgcagcaccacgctggaattacgcctcagtttaatccgctccaacgtcgctgggcggaatcctgccttgaatttcaggtagcgcaggaaattggacgccactggcagcgtcgggcgctccagcctgtaccacctgatgagccactgtttatggcactacttttttccatgttgcgggttcccgatccattgcgggatgcgcatcagcgggacagacaattgcgtcagtctatcaaacgtctggtaaaccattttcgtgagctgggaaatgttcgtttttatgatgaacaggggttatgtgatcagctttatacccacctcgcccaggcgttaaatcgcagtttgtttgccatcggtattgataataccctgccggaagagttcgccagactgtatccacgcctggtacgcaccacccgcgcggcgctggccggatttgaaagtgaatacggcgtccatctttctgatgaggaaagtggtctggtcgcggtgattttcggtgcctggctaatgcaggaaaacgatctgcatgaaaaacagattattctactgaccgggaatgatagcgagcgagaagcgcagattgagcaacagttacgcgaactaacgttactgccgctcaacattaaacatatgtcggtaaaggcatttttgcagacaggcgctccgcgnggcgcggcactgattattgctccttataccatgccgttaccgctcttttcaccaccgctgatctatacggacctgacactgacaacacatcaacaggagcagatccgcaaaatgctcgaatcagcatgagggaacaactttcgggcgcaaaaacattgccggaagcgccaccagcgccatcacccagaacacgccgtggcccagatattgatacaggaaaccggcgaaaacggtcatgatagcgatactgccgcccatcgcgacggcagagtaaaccgcctgtaaacggatgacttcgctaccctggcgagcagcaatatagcgcatggcggccaggtggcagaccgtgaaggtgccgcaatgcagaatttgcaccactatcaaccacggcaacgccgtagttgctcccataatgccccagcgcactacgccgcaaatcgctgagatcaacagcatatcgcgtgcactacaacggcggaaaagtttattactcagtgcaaagataatgacttccgccaccacgcccagcgaccacaaataccccaccgccgaggccgagtagccagctgcctgccagtaaatggcgctaaaaccgtaataggccgcatgtgccccctgcaataaacaaacgcaggccagaaagcgccagttctggcgaaccagcgccaaccacgctgaccaaccggtgctctcctgctggcggcttgccccttgtggctgaatcgtcggacggatgagaaagccgagcagcatggatgccacgcccaangtcaacagcacgaggatcacccgataatcaaacatagtgaccagtttgcccgtcagcgccgagccaatgacaaacgccaccgagccccacagtcgcactttgccgtaatcaagcgggaactgcttttgccacgtattcgccagtgcatcggtcaacggtaccagcggtgagaaaaagaggttaaagccaatcatcaccagcatcagccacgctacgtgcgcccccgcccagaaggcgacagcaaagagaagtgtcagcagtgccagcacgcgcaaggcggaaatcaggcgagaaggatcgctgacgcggggcgcgatgagcaaactcccgagaaaacgggcaaccagacctgcccccaataacaggccgatggtttctggcgttaaaccaatccctttaagccagacgctccagaaaggtagaaaaatgccgtaactaaaaaagtatgtgaaatagccgagcgccaaccagcgcgtggattgcaaaaccatgagtccctcccgtcaggaggcgttagtctggagttaatcgaatgttggtgcaagttgaaaaataagaatattcgagcctgcttcccgatgtctgtaacgccagttcacaagcactcaaaaactgcgatccngtgacgcatgttgcaaagataatgcgtaattatgccgttacgcttgccaaacgttcctgcacaatggcgatgaaatcgcgtaatgccggcttcatctcccctttcttccacgccatcagtaaagcaatggaaggcacatttccggcaatgggacgaaaaacaacctgcccggtattaaaattattcatataaccgggtatcaaagtgacgcccagccccatgcccaccagattcatggtcaccagaatattcgttgccacctggacgatatttggctggctgttttcttgtgcaaaccacgctttaacgatcggcgcaagcgaaccggaatacgccggatcggtactgacgaaattcacgccatccagttgcgcggcggtgatctctttttcatgtgctaaagggtgatcaaccggtaacaccaccactaatggttcgtcaaaaagctccagataatcaatctccgggctataaacaggatggcgcattaagccgacgtcgagttcaccacggcgaattttttcctcctgttgcgtggtgattaaactcaccagctcaatcaaggtgtctggctgtctgagacgaaacatcggtaatacttttggcagtaaattcacttccgccgatggcacaaagccaatggttaattgtctgtcttcctgaacaattttccgcgcccgtaatttggcattttccgcttgttcgaggattgccagcgcgtcctggagaaaacattctcccgccgccgtcaacgcgactttgcgcttatccctcaccagtaacggaacaccgacacagttttcaagatcgcggatctggctgcttaacgaaggctgtgaggtatgcagtttttccgccgcacgggtaaagttcagtgcctgcgccactgcgacgaaatagcgtaaatgccgtagttccatcaccttccccttgttatcgaaaaaacgtctcagctggtagaaattaactatttcacatattagcaaccaaccagcaacatccttatggcacaaaaatagaaggtcaatacatcttatctttcaggattaaaaaatatgaccacaccctcagatttgaacatttaccaactgattgacacccaaaacggtcgggtcactccgcgtatttataccgacccggacatttaccaactggagcttgagcgtattttcggtcgttgctggctatttctcgcccacgaaagccagatcccaaaacccggtgatttctttaacacctacatgggagaagatgcagttgtcgtggtgcgccagaaagacggcagcatcaaggcgtttctcaaccaatgccgccaccgggccatgcgtgtgagttatgcagattgcggcaacactcgcgcctttacctgcccgtatcacggctggtcttatggcattaacggcgagttgatcgatgtaccgctggaacctcgcgcctacccacaagggttgtgtaaatcccactgggggctaaacgaagttccttgtgtggagagttataaagggctgatttttggcaactgggataccagcgcaccgggcctgcgtgattacctgggtgacattgcctggtatctggatggcatgctggatcgtcgcgaaggcggcaccgaaattgtcggcggcgtacaaaagtgggtgatcaactgcaactggaaattcccggcagagcagttcgccagtgaccagtatcatgctctgttcagccatgcttctgccgttcaggtattaggggcgaaagatgatggcagcgataagcgcctcggtgatggacaaaccgcccgcccggtgtgggaaaccgccaaagatgccctgcaatttggtcaggatggtcacggcagcggcttcttctttactgaaaaaccagatgctaatgtctgggtcgatggcgcagtttccagctattaccgcgaaacctatgccgaagctgaacaacgtttaggtgaagttcgcgccctgcgcctggcgggtcataacaatattttcccgacactttcctggctcaacggcactgccacactccgcgtctggcatccgcgcggccctgatcaagttgaagtgtgggcgttctgtattactgacaaagccgcctccgatgaagttaaagccgcttttgaaaacagcgccactcgtgcttttggtcctgctggttttctcgagcaggatgactcggagaactggtgtgaaatccagaaattgcttaaaggccaccgcgcccgcaacagcaaactgtgtctggaaatggggcttggtcaggaaaagcgccgcgacgacggcattcctggcattactaactatatcttttcagaaactgccgctcgtggaatgtaccaacgctgggccgatcttctgagtagcgaaagctggcaggaagtgctcgataaaaccgccgcttaccagcaggaggtgatgaaatgagtgcgcaagtttcactagagttacatcaccgcattagccagtttctctttcacgaagccagcttactggacgactggaaatttcgtgactggctggcacagctcgacgaagagatttgttacaccatgcgcaccacggtgaacgcgcaaacgcgcgaccgccgcaaaggtgttcagccgccgacaacctggatttttaatgacaccaaagaccagctggagcggcgaatcgcccgtctggaaacgggcatggcatgggcagaagagccgccgtcacgcacccgccacttaatcagcaactgccagataagcgaaaccgacatcccaaacgtatttgctgttcgggtgaattatctgctttatcgggnacaaaaagagcgcgatgaaacgttctatgtcgggactcgttttgacaaagttcgccgtctggaagatgacaactggcgcttgctggaacgggatatcgtcctggatcaagcggtaatcacttcccataacctgagtgtactgttctgatgaatcgaatttatgcgtgtcccgttgcggatgtgccggagggtgaggctctccggatcgatacctcgcccgtcatcgccttgttcaacgttggcggcgagttttatgccattaacgatcgttgcagccatggtaatgcgtcgatgtcagaagggtatctggaagatgacgccacggtggagtgcccgctacacgccgccagtttttgcctgaaaacggggaaagcgttatgcctgcccgccaccgatccgctcaccacttatccagtacacgttgaaggtggtgacattttcatcgacttaccggaggcgcagccatgagcgatctgcataacgagtccatttttattaccggcggcggatcgggattagggctggcgctggtcgagcgatttatcgaagaaggcgcgcaggttgccacgctggaactgtcggcggcgaaagtcgccagtctgcgtcagcgatttggtgaacatattctggcggtggaaggcaacgtgacctgttatgccgattatcaacgcgcggtcgatcagatcctgactcgttccggcaagctggattgttttatcggcaatgcgggcatctgggatcacaatgcctcactggttaatactcccgcagagacgctcgaaaccggcttccacgagctgtttaacgtcaacgtactcggttacctgctgggtgcaaaagcctgcgctccggcgttaatcgccggtgaaggcagcatgattttcacactatcaaatgccgcctggtatcccggcggcggtggcccgctgtacaccgccagtaaacatgccgcaaccgggcttattcgccaactggcttatgaactggctccgaaagtacgggtgaatggcgtcggcccttgtggtatggccagcgacctgcgcggcccacaggcgctcgggcaaagtgaaacctcaataatgcagtctctgacgccggagaaaattgccgccattttaccgctgcaatttttcccgcaaccggctgattttacgggtccgtatgtgatgttggcatcgcggcgcaataatcgcgcattaagcggtgtgatgatcaacgctgatgcgggtttagcaattcgcggcattcgccacgtagcggctgggttggatctttaaggaagtacgatgaaagaaaaaacgatcattattgtcgggggcgggcaagcggcggcaatggctgcggcctcgctacgccagcaagggttcaccggtgagctgcatctgttttccgatgagcaacatcttccttatgaacgccctccgctctcgaaatccatgttgctggaagattccccacagttgcagtctgtgttacccgctcactggtggcaggaaaacaatgttcatctgcattccggtgtaaccatcaaaacattgagccgcgacacacgagagttagtgttagccaacggcgaaagctggcactgggatcagctttttatagcaaccggcgcggcagctcgaccgctgccgttacttgatgcactgggagaacgctgctttaccctgcgccatgccggtgatgccgccagactgcgagaagttctgcagcccgaacggtcagtcgtgattgtcggtgccggaactattggtctggaactggctgccagcgccacgcagcgcagatgtaaggtgacagtgattgaactggcggcaaccgtcatgggccgtaatgcaccaccgcccgtgcaacgctatcttttacagcgccatcagcaggctggtgtgcgcattctgctcaataatgccattgaacatgtggtcgatggtgaaaaagtagaactgacgctgcaaagtggcgagacgcttcaggccgatgtggtgatttacggtattggtatcagcgccaacgaccaactggctcgcgaggccaaccttgatactaccaatggcattgtcattgatgaggcttgccgcacctgcgatcccgcgatctttgccggtggcgatgtggcaatcactcgtcttgataatggtgcactacaccgctgcgaaagctgggaaaacgccaataaccatgcgcaaattgccgctgccgcaatgttagggctaccgcttccgctactgccgccgccgtggttctggagtgatcagtacagtgataacttacagtttattggcgatatgcgtggcgatgactggctttgtcgtggcaacccggaaacccagaaagcgatttggtttaatctgcaaaacggcgtgcttatcggtgcggtaacgctgaatcagggacgtgagattcgctcaatccgcaaatggatccagagcggcaaaacgtttgatgcgaaacagctgacagatgagaacatcgcgcttaaatcactgtaaccaggataattagcgaatatctcaacgcctggggcgtggcgaggtaccagagtgtgtattacgtttaaatcacattatcttgcaaagggattggttatgaactcactacgttattttgattttggtgctgcccgccccgttttgttattaattgcccgtatcgccgtggtcctaattttcattatttttggttttcccaaaatgatgggctttgacggtacggtccaatatatggcctcgctgggcgcaccgatgccgatgctggcagcgattattgcggtagttatggaagtgcccgccgcgatattaatcgtgcttggctttttcacccgtccgctggcggtactgtttattttctacacgctgggtacggcggtgattggtcaccattactgggatatgaccggcgatgccgtcgggccaaatatgattaatttctggaagaatgtcagtatcgctggcgcgttcttgctattggcaattaccgggccgggggcaatttctctcgatcgccgttaggaaagatgccggatgcggcgtgaacgccttatccggcattttataaattacagccactctacccgcaacgacatctctgaggttgttgattcccccggcgcaagcgcaatgaggtcacccccttccgggcgatgatggtcatccggcgcatggctcatcggctccagacagaagaaatcaaacgcatatcctttatcaaacgccgggtcggaaacaaagatgaaataacacggtgcaggtggcgtcgtttctatgatgatggcataaccctcctgcggctgctcgatgcgggcctgaccattccatccggcaaaaccattgttcacccactggcgcggcaacggcgctagctggttaaaatccagttcttgcggtagctgctcgcaaaactcacccgccagccactgctcccgctccagccagtaaccgctcgcctgtgcctgaatccgcgtttgcggcgacaacggaaaataaggatgccagccggtaccaaatggcagcgtctctgccccttgattggtgacagagagcgtcaccgtcagcgtatccgccgttaaatgaaacgcctgacttacccgatagtgatagacaccgctgcgatgttcatacaccagacacaaactatcatcgctgtgcgagacacattgccactcgcccagccagccatcgccgtgtagatagtgcgcatcccactcaacattcggttgcagttgatactcacgcccctgccagacaaaacggttgccgctcacccggtttgcaaatggcaccagcggaaaacaagaggcatcggttgccacaccgctttttttaccaggacgtaagagcggcgtcgtatcgcgccagaagccttcgattacgccgccctggtcagaaacgcccagctttagcgacccgtgggataaggtatagatggtcatccgctaactccttaatccgggaagttaatcacaactttcccgcatttgccgctcgccatcagcgcataggcatcacctgcctgttccagcgagaagcgatgggtaatggcgttacgcggccacagcttccagtcagtcaaatcgtgggcgcatttttccatatggaacagactggtcacccaggagccaataatccgccgttgatggtgcatcagatcggcgctgacctcgaattccacttttccggtttcaccaatgtaaaccacccgcccccagtcagcggtggattgcagtgccagtaagcgacctgcggcattaccggaacaatcaagcgcaacatccgcgccgccgtgagtgagttcggcgattatctgcggcagaccttcagtggtcgctaaatagccgtgatccatcactcctaactgttttgccatcgccagacgttccggcagcatatcaacgccgataatccgttttgcaccgcgacctttcgccagcatcatcgccatcatgccgactggccccagaccgaccaccagcacgttatcactgccggaaacttcgccgcgcaaaatcccttcataggccgtgccaacgccgcaactgataaacgcaccatcttcgtagctcagcgcatccggcaggaggatcagatctttttcttccgccagcaagtattcggcatgaccgccgtcacgctgccagccgtaagccgcttttccttcgccagtacaagaaataggaaaaccgcgacggcagttcgggcaaaaaccacagccagaaatgtgatacaccagcacgcggtcgccctctttaaaatggcggcagccttgccccatctccacaatctgcccgcacggttcatgaccgttgataaatccctggtacaacggtttatcgggtgccgccgccgtagcgcggtgctggtggtagatatagtggacatcgcttccgcaaattccggaggatttcattttgatcagtacctggttaatccccggcgtcggcactgcaacttcccgcagatcgacggtcgaatttcctggtaaataagctgccagcatcgttttcataaatccctcattaacaatacgattaattttcatccctgccgcacccgcgccaggggcgttaaggtttagcgtttcgctttactgctacgctgggtcagcaagatattcgccagcaccgccaccacgatgatgacgccgcgcaccacctgctggaaaaaggagttaatcccgagcagcaccagaccgttaccgattagcgtaatcaccagtacgccaagcagcgtaccgaacaacgagccgcgaccaccggaaagcgccgtaccgccgaccacgaccgcggcgatgacgtcaaactccagaccgtttgcggcacctgcgttaccggaaccgaggcgcgccgccaacaaaatgccggtcaccgccgctaataatcccgaaagggtaaagataagaatgcgtacccgacgaacgttaataccgcacaactgcgccgccgtggcattaccgccaacggcaaaaaccgagcgcccgaaggcggttttgcggctaatgaacacaaacagcgcaaacagcaccatcatgatcagcgcggataccggcacaccgagaaattgtccgcccagccagtccagcacctcgttttcgtcaatcggcactggcagagcgttggtcataaacaagcccattccgcgcagggcgctccacagccccagcgtggccacgaaacttggcacgttaaacacgccacgcagcaccccggcgagcgttcccatcagcgcgcctaacagcaacaccagcagacaagcaatcgccaacggaacttcaaattgcagcaaaaatgccaggcacaccgagacaaaagccaccatcggcccaacgctgacatcaatttcaccggagataataatcagcgtcatcgcccaggcggcaatcccaatggtggcggcatcgcgcagcacgttcatctggttattcaatgagataaagccaggcgcgttcagggagaagaccagataaagaatggcaatcaccaccagcaaaccgatctcattaatatggcgactgacaaattgtttgagcgagacgctcttgccctgcggcaatggtaatgacgaagcagacatcttcaggttcctcggtaaaattcatcagtgcacagacagaatggcggacatcagctcatccacattgaccggagcgtgaaactcctgcgagaacgtgccgtgctgtaataacaggatgcggtcacacaccaacggcaactcctccacttcactggagataaacaccacgctttttccttcggcagccagctcacggacaatacggtaaatctgctgtttggcttcgatatcgacgccgcgcgttggctcgtcgagcaacaaaatctggctggcggcatagacccaacgaccgatcactactttttgctgattgccgccagaaagcgtgccgatgggcgtttcgctactggcggccttgaccgtcatccgctgcatcacttcttcggtcaggcggcggatggtggaccattgcagcactccgttggcgctgattttttgccgattggtcagcactgtattttcgtcaacgcccaaccagggaatgatccccgcttctttgcggttttctggcgtatagccaatgccgcgtttcagcatgtcgccgtaatcggggcgcgtgattttctcgccgttgataacaatttcgccctgttcatacgtctccagcccaacaatcgccttcagcaattcactgcgccctgcccccagcagaccagcaatgccgagcacttcgccacgacgtagcgtaaagctgatatcctccagcttgggcttatggcgtaacgcacggacttccagcacggcctgatccacaatttcctgaggtgcaaccggcgcaatatcaacgtgatcgcgccctagcattagcgacacaatatgatgcgtggaagtgttttcgagcatcacatcgccagccacctgcccgtcgcgcataacggtggcacaggaggcaatgcggcgaatttcttccatccggtggctgacataaatcaccgccacgcccagtgctgacatctttttcaccgctctgatcaccagttcaacttccgcactcgcaagcgaactggtaggttcatcaagaatgaccacgcgcggctcgcccttcatcacccgcgcaatttccaccagctgcttatgcgccgggcttagtgttgaaacaagttgttcaggactaacgtcaacgcccagcgcctgtaagcaacgttgggcatcctgcgccatttgcaggtaatcaatcatgccgttgcggcggggccactgaccgaggcagaggttttccgccaccgtcagcccttccaccagacttaactcctgataaaccgcgcgtacccccagttcagcggcacggcgagtcagcgtagcttcgtcaccttccagtcgcgtctcgccaatccagatttcaccgctatccggacgttcactgccggtaagcattcgaatgagggtcgatttgcccgcgccgtttttgcctaacagcgcacgaacctcgcctttattgagcgtgaagttaacgttatccaacgcaacgacgccgggataacgcttatttcctgccaccacttttgctaccgggactgcctctgttgccgtgaacatagggacctctgcgaatcagcgattagggcagaccatcaacgtgcgttgccagccactgtttaccgtcttccgttttggtatagagatcgataggcacctgaatcactttttcaccgtcggcttgtttattgataaccttcaatgtttgcgcgaaaacagcattgcccattttcttaccggaaatatccactaccgctttcagcacctgattgttttccagctcctgagcaatttcggttgtcatatccgaaccgaaaacagcaatttttccggcctgattttgattacgtaccgcttttaccgcgccgagtgtcgcaccgcccgattcccccataatggcgttgagatccggcgtggagataatcagtttttcaccaacggaaatcgctttatctaaaacagtcccttcctgattagcgacaatttgcgcgccgggaacgcgggattttaatacttnttcaaatcctttacgtcgctgcacacaaacttcaaaggcttcgcaattgatgacggcaattttcggctggtcaattttattggcaataaaataatcggcggcagcgttacccagttttttaccaaattccagcgggtcacccaccagatacgccgagacatatttatcgacccccttttgattaatacaggtgttgtagcaaatcaccggaatacccgnttcactggcgcgacgaacggtacggntactgccattttcagacactgccgataaaataatagcatngacattacgcgccacgagggtatcaacaaaggtactttctttcgaaatatcaccctgggcgttagtttcaattaactgtacctgtactgaagaatcttttgccgcatcctgaactccctgacgcactccagcgtaatatccctgagtatcaaggtatattgcgccaatggtcatttctttatccgcagctctggcaaatagtgcgctacctaatagcgtagccattaataatagattacgggttgttctcatttttttaggcatagagcctcctgtagggtttttattaacaacggcttattctaattattttgtgatgagcggcagcgcgtgccgctcaaatattacagttaatagggtttagtgaacgtagttaaaaataaaaggcatcacggtggtgaataatgccgctttcggccaggccggattaatcgccgtcaattcagcgcgagcagattcgtattgcgcaatctcgcctaatcccgcggccgccagcatcgccaccatcaggcatttttctttatgctgctgttgtaaatcgccatacagcgacaacaagtcaggctgcgagacggcaaagaaatccgcttcgatactggttttcgccatctcttgcgcccactgtttcatttcactaaacagttgctgtgcggtgtgttgttcgcccagtaatcgcagcgccattccttgccagaagaggtaatcaaccggctgatcgttgtaatagctgtggatgttaatggtgcgatcgccggtcgccgccagatgtaaacagcgcgtcgcttcagtttcatcgccctgggctttggcgcatatcgcctgccagaaccagatgtcgttatcagtttgccccggtaaacggccttcgcttaaattctccggataatgcagcgcggcatgaagcagttcgctggcctgctgcggctctctggcatcaagatgctgccaggcgcgtaataactggttgaggataaactgactggtgaccttcccttccccgccttcccacgggtggaatttgcgcgtggcgagaatgtccgccgctttgtctgcctgccccgtgagatgccacaaattgagcagttctgcggtcatgtcgtcgcgtttcagcgcaatttccagattattttccagacgcgccagtcgtttctccggtgtggttccacttagcttatcaagcaaatcccgttcgaaaagcagacgtgcatcctgcggcgcaagctgataagcattatcaagataacgcgcggccagctcataatcgtgttgcttattccacgcatggatcgctaacccgcgccagccgtcggcaaactccggcgacatctctacgcaacgttgccataaggcaatggcttcgttgtagctacgtttgttgtagtagaagcaggccagtaaatggcgagcaaaccagcactcttcaatactctccagagccgccacttcttccagcgtattcgggaaacggacaaactgcgggaagacatcaatggcttttgcgaccagttcgccacgttcggctttcggcagcaagctggcttgcaggtaaagcggcagcgtgcgctggcagtccagtgcgttcagcatctctgccgcgagggtgggcattccccagttaatcagttgcccggcggtcatcagggcgttaacgtcgcgtccctgacacagaccgcgccactgcgcgagagctgattcgctacgaccatcgaaccagttcaggcaccacagagtggcgttcagcggataatcgcgcagcagtttctcgcgctgcaaacgcgcgttgtcctgacgaccacttaacaccagcagcagattatgcaggcaaagcacttcctgattggttgggcaggcgcgaagactttgttggcaaaaatccagacccgcgtcgaagttaccattacgcgccgccagtcgtgccagaccataatagcctccggctttactgttgccgctccagaccgcacgccagaaatcctcttcggcttgttgatattgtccctgacgttcgtaagcactggcgcgaatcaaactcgcctgtccgcactgcggatttttgttcagcgcatgtgcgcgtttcagagcctgagtggcatacgccaccgcttgcgggaaatctgcgcggttatactccagcatcgccagcgccagattacagcggtaatccagcggatccagcgccacgccgcgcaggtagtaatcgaacggtgaacggctggcgtgatgatattgctccagatgctgaccgataaaccaggcttcatctgtactggtaatgtcttgtgctgacagtggcgctttggcgacgtccggcaacggcaactcttgcggctgatgttcctgataactcagtacaatattgccgtcggcatcagagagctcaatggtcagtctttcaggattgataccgtgtaacacgccctggatggcggtcgctggtgtcagggccacggcatcatcgagcaacgcgtcgcatttgccgatttcgcggatcgccaggcggtatccgttcaacggagagatggcatacagcccccactcaatcccccgctcactacgctggagtttgattaccgcatcgcgggaggcgttttgcaccatgcccagagaatggtaaggcaggaaaaactgctcaaaacgcttctcttcgtaagcatcaagccaggtaaaatcaggctggttatcggcaaaaataccggtcatcagttcgatatacgggccgttattatcagttaggctcttatcccacgcctggccaaattcactgtgtccccagctccactgctttttacctggcgcaatatggtggttggcaacgtgtagcaaaccgccatcttcatcgtgacaccacgcgccaacaaaatcgtactgtgatttttcagccatatatgaggttggaacgggcacatttttatagcgagaaatgtccactccagcggagtagtccactttgtagtaagtgccggtggcgatagggaaagcggagacggcccgtttgcngtgatcaaacaccgccgttacatccggcggaaagacgntctgatgcccttcaccccctttcactgccggattggcccaccacaagaaatgacgcggcgtggcgttgccgttatagacgcggctggcgatttccagcgccgcccggtcagggcgcagggtgaaacctgtcatcacctgtaaaccatgcatcggctccgtttcgcctacccacaccgtctgtgcgccgtcttcatgggcttcgagggtgaaatcaacgggcataaaggtggtcgggcgatggtgttgcggccagttaaactcaatcccgccggagatccacggtcccagcagccccaccagcgcaggtttaatgacttcattgtgatagacaaaatcgcgctgtttcactttatcccatgcgcgatgcacccgaccgcccaattccggcaggatcatcactttgatgtagtcgttttccagccacaccgcctgccaggatttcagggttttctgctcgctcagcgtatcggtcacgccgtagggataaaccgcgccggacgatccctgataaacgcgattttccaggaacatgggatgtatatcctgcggcccggtttcataggtcgggatctcaacgcgctcttgccacacttttactggagtcatggtgccctcaatattaacaagacatactgaattaaaagatttgtggcagtgtattgaacaatctggcaatgttttcgcggaataatcacgcaattaactaaacaaggtttagtgaagatgagagcctgcattaacaatcaacagattcgccaccataacaaatgcgtgattctggaactgctgtaccggcaaaagcgcgccaataaatcaacgctggcccggctggcgcaaatttcgattccggcagtcagtaatattttgcaggaactggaaagcgaaaaacgggtggtgaatatcgacgatgaaagccagacgcgcgggcatagtagcggtacatggctgattgcgccggaaggtgactggacgctgtgtctgaacgtgacgcccaccagtattgagtgtcaggttgctaatgcttgtttaagtccgaaaggtgaatttgagtatttacagattgatgcaccgacgccgcaggcactgctgtccgaaatcgaaaaatgctggcatcgccaccgtaaattgtggccggaccgcaccatcaatctggcgctggcaatccacggtcaggttgatccagtgactggagtgtcgcaaaccatgccgcaagcgccgtggacaacgccggttgaggtgaagtatctgctggaagagaagctgggcattcgggtgatggtcgataatgactgcgtgatgctggcgctggcggaaaaatggcaaaataattcgcaggaacgggatttctgcgtgatcaacgttgattacggcattggctcgtcgttcgtgattaacgagcaaatttatcgcggcagtttgtatggtagcggacagattggtcacaccatcgttaatccggatggcgtcgtctgcgactgtggacgttacggctgcctggaaaccgtcgcctcgttaagtgcattaaaaaaacaggcgcgggtatggctaaaatcacaaccggttaatactcagcttgatcctgaaaaactgactacagcgcagttaatcgctgcctggcaaagtggagaaccgtggatcaccagctgggttgatcgctctgccaatgccattggtttgagtctgtataacttcctcaacatcctcaatattaatcagatttggttgtacggtcgcagttgtgcctttggtgagcactggcttaatactattattcgccagacaggatttaacccgttcgaccgcgacgaaggaccgagcgtgaaagcgacgcaaattggcttcgggcaattaagccgcgcacaacaggtgctgggaattggctatttgtatgttgagacgcagttacgacagatttgatggcgcgataacgtagaaaggcttcccgaaggaagcctttttcaacagattaaccgtttcgcttatgcgtaaaccgggtaacgtgcgcagatgtcgagaactttacctttgatgcgctcgataacggcttcatcattgatgctgtccagcacgtcacacatccagccagccagttctttcgcttctacttctttgaagccgcgacgcgtaattgccggagtacccacgcgaataccggaggtcacaaacgggctcttcggatcgttcggtacgctgtttttgttgacggtgatgttagcacggcccagagcggcgtctgcttctttaccggtcaggtttttatcgaccagatcaaccaggaacagatggttatcagtaccgccggaaaccactttgtagccgcgttccaggaacacttctaccatcgctttagcgtttttagcgacctgctgctggtaagttttgaactcaggctccatcgcttctttcagagcaaccgctttaccggcgattacgtgcatcaacggaccgccctgaccaccagggaaaacggcagagttcagttttttgtacagctcttcgctaccacctttcgccaggatcagaccgccgcgcggacccgccagggttttgtgagtggtggtagtaacaacgtgagcatgaggaaccgggttcgggtagacgccagcagcaaccaggcccgcaacgtgcgccatatcaacgaacaggtaagcgccgatgctgtcagcgatttcacgcattttcgcccagtccaccacgccggaatatgcagagaagccaccgataatcattttcggtttgtgttctttggcttgtttttccagatcggcgtagtcgatatgaccggtagcatcaataccgtaaggaacaatgttgtacagtttaccggagaagttaaccggagaaccgtgagtcaggtgaccgccatgcgccaggttcatacccagaacggtatcacctggttccagcagcgcggtgtagaccgcaaagttagcctgggagccggagtgcggctgtacgttagcgtagtcagcgccgaacagttctttcgcacgatcgatcgccagttgttcaacgatatcaacatactcgcaaccaccgtagtagcgtttgcccggataaccttcagcatatttgttggtcagctgagaaccctgcgcctgcattacgcgcgggctggtgtagttttcggaggcgatcagttcgatgtgctcttcctgacgtactttttcctgctccatagcctgccacagttcggcatcataatcggcaatgttcatttcacgctttaacatccgcatctcctgactcagctaacaataaaatttttggcctttataggcggtcctgttggacaacggcgaacagtataaccgaatcattgtgcgataacaggtcttgacaaaggaatttacgcaaacgattaccttcaggctacgcaaggctttggagaataaagagcttgcaaccggaaacggatttcttttcaggtttgtgatgcaaatttttcacttcatcacattctttctgaaaaacaccaaagaaccatttacattgcagggctattttttataagatgcatttgagatacatcaattaagatgcaaaaaaaggaagaccatatgcttgacgctcaaaccatcgctacagtaaaagccaccatccctttactggtggaaacggggccaaagttaaccgcccatttctacgaccgtatgtttactcataacccagaactcaaagaaatttttaacatgagtaaccagcgtaatggcgatcaacgtgaagccctgtttaacgctattgccgcctacgccagtaatattgaaaacctgcctgcgctgctgccagcggtagaaaaaatcgcgcagaagcacaccagtttccagatcaaaccggaacagtacaacatcgtcggtgaacacctgttggcaacgctggacgaaatgttcagcccggggcaggaagtactggacgcgtggggtaaagcctatggtgtactggctaatgtatttatcaatcgcgaggcggaaatctataacgaaaacgccagcaaagccggtggctgggaaggtactcgcgatttccgcattgtggctaaaacacctcgcagcgcgcttatcaccagcttcgaactggagccggtcgacggtggcgcagtggcagaataccgtccggggcaatatctcggcgtctggctgaagccggaaggtttcccgcatcaggaaattcgtcagtactctttgactcgcaaaccggatggcaaaggctatcgtattgcggtgaaacgcgaagagggtgggcaggtatccaactggttgcacaatcacgccaatgttggcgatgtcgtgaaactggtcgctccggcaggtgatttctttatggctgtcgcagatgacacaccagtgacgttaatctctgccggtgttggtcaaacgccaatgctggcaatgctcgacacgctggcaaaagcaggccacacagcacaagtgaactggttccatgcggcagaaaatggcgatgttcacgcctttgccgatgaagttaaggaactggggcagtcactgccgcgctttaccgcgcacacctggtatcgtcagccgagcgaagccgatcgcgctaaaggtcagtttgatagcgaaggtctgatggatttgagcaaactggaaggtgcgttcagcgatccgacaatgcagttctatctctgcggcccggttggcttcatgcagtttgccgcgaaacagttagtggatctgggcgtgaagcaggaaaacattcattacgaatgctttggcccgcataaggtgctgtgatttgatgttgccggatggaaacatccggcaacccttgacgcggtttaaattgccgcgtcgtcctcttcaccggtacggatgcgaatgacccgtgccacgtcaaagacgaagattttaccgtcaccgattttgccggtttgcgccgtgcgaataatggtatcgacacaggtatcgacaatgtcgtccggtacgacaatctcaattttcactttcggcagaaaatccaccatatactccgcgccgcggnacagctcggtatggcctttctggcggccaaaacctttcacctcagtgaccgtcatgccggtaatgccgacttcagccagtgcttcgcggacatcgtccagcttgaagggtttaataatcgcatcaatctttttcatgctattccttgaaaaggtcgcctgtcttttgatctgctaaacgtaacacataacgccaattcattccttgaaatcgtttgcatccagctcgtgtcgggaaagcagtttataaaattctgtccggttgcgccccgccattctcgccgcgtgggtgacgttgcctttggtaatttgcagcagcttacgcaaatagttgagttcaaactgattacgtgcctcaacaaaggttggcagcgccgtattttcaccctccagcgcctgctctactaatgcatcgctaatcaccggagatgaggtcagcgccacgcactgttcaatcacgttgaccaactggcgcacattacccggccagctcgcggtcatcaggcgtttcatcgcatcggtggaaaacgcgcggacaaacggtttatgtcgctctgccgcctggcgcaacaggtgatttgccagtagcggaatgtcttctgtgcgctccgccagtgccggaattttcaggctgacaacgttgaggcggtaatagagatcttcgcggaattccccgcgcgccatcgcttttggcagatcacggtgagtggcagaaataatccgcacattgatatcaatatcgcggttactgcccagcgggcgcactttacgctcctgcaacacgcgcaacagtttgacctgcaacggcgcaggcatatcgccaatctcatcgagaaatagcgttccgccttccgccgcctggaataaaccttcgcgattgctgacagcgccagtaaacgcgccacgcgcatgaccaaacagctccgactccagcaattgctcaggcaatgcaccacagttaatagcaataaatggtttgctattgcgcgggctggcgttgtggatagcctgggcgaaaatctctttcccggtgccgctctggccattaatcaaaacgctgacgtctgattgcgccaccagccgcgcctgttccagcaaacgcagcatcagcgggctgcgggtgacaatcgcctcgcgccagcgttcgtcggtggctggcgcggattgttccagcgcatcatcaattgcctgatatagcgcgtctttatcaacaggcttggtgaggaaactaaaaacgccctgctgtgttgcagcaacggcatcgggaatagaaccatgcgcggtaagaataattaccggcattcccggctgcactttctggatttcagcaaacagctgcataccgtccatttcatccatccgcaggtcgctgatgactaaatctactttttcgcgattcagtacccgtaatccttcagcgccactttccgccgtgaccacgctgtagccttcgctggtcaggcgcaggccaagcagtttcagcaatcccggatcgtcatcgaccaataataaatgcgcaggtttatggctcatcaggagtgacctcatgggtggatggcgcgggcttttcactctcgtgtggcgtatccggcgagaaatttccagccggtttgcgggtcgagagctggcgttcaatatcagtcaggttttccagcttgcgggtggtgagttccagttgctgctgtagaacgtgatgttgctggcgcaatgtatccagctcgctgtcgctggactgctggagtttactgtagcgttggcgctcttccgccagttgcagttgcagcgcctgaccgtcgcgccagagttgatacagtgggcgaacctgtgccgggatctcggtacttaacgcttcaatacgcgcgaccagctggcggcgctcatatggcgtaattttggcgtcggcgagcaaaatcccttgtttaaaggtattttgccagctgccgtcgtcatattggcgagcttgctgacgcgactgcgcaggcattaaacgatcagcacaatccatcgcccgcagccagtaaagcggattggtttcggttgatttaccttgcagcgcccagatgtcgctacattcagtagaaagatagtcagccagttgataaaccggaattttttcttctgctggcgtatcaatggctggcttattgtgattctgcacgcaacctagcaatgccagacatggcagccctgccagccacagccgtcggggcaataatcgttgaaaaatgtgtcgcatattcaccagacttaaagcctatcccagtgggcgtaattgttgcagacagtttggacatggacagcgcggagaaaccggagcgtacatgtcgtacgtgaggatttcgagcactgcccggggccgaactgacaaataaaatagcctgatgggataggctgttagcattatttcgtgtttttcgacgacggtaattcaatgcggaaacaaacgtcttgcccgctctcgtcgaccagatacagttccccttgcatacggcgaatacaatccctggcaatgcttaatcccagaccgctgcccttcaccgccccttttcgctggtggcttccctgaaaaaagggttcgaagatcatggcgcgttcctcttgcggaatgggcgtgcctgtattgatgacatcaatataaacccgcgcaccatgtaaactgctgcgaaggcaaatgttaccggattcagccccgtagtgcaccgcattggagtaaagattatccagtacgctcatcagcagcattggctccgccaggcaagctgttgctttgagatcgacgtcggtatgcatcattttagcccgtgcgggcaggctatgagcagaaactactgtctccaccagcggtgctaactcaacattatctagttccaccgcactgtccgcctgtttacggttgtaatcaagcagttgttcgatcagtttttgcaaattgcggctgctgctatcaagaatgctcaccacctctttttgctctggcgtaagcggcccgacaacctgatcagccagtaattcagtgccctcgcgcatactcgccagtggcgtttttaattcatgagataaatgtcttaaaaattgatggcgttgggattccagccatgacaggcgctcacttaaccaaagaatacgttgcccaaccgagcgtaactcgctcggtccactgaacgaaacgctattgcccagagaacgcccttcccccaaccgattgatcatccgttcaatatttttcaccggcccgataatcatccgcgtgaaaagcagtaccattaccagactcaccagaaatagcaccagcgattgccaaccaaaatattgcccacgttcggcgatttcacgctgaagttgctgcccacgagagaacactactgtgcgcgtggcctgtaccatttcggtattggcactggcaaaggcttccagacgcgcggcagcagcagcatcgggaccactgttgttgcactgaagttgggccagattgttcaagtcctgacgcaatgcctggtaaagtttatcgtctggcagtacgcctgcgtgggcatcgagcatttcgctgtaacgcttgcgctggctttgataaaccttcgcaagcgtagggtcatccagcacgcaatactgacggtagctacgctccatctccagcgccgcgttggtcattgcttcgctgcgccgggcatcgataagcgtggtgcggttgaccagcgccgcctggtcgctaagcgcattcaggctttgccaggcttgccatgccagcaccaacaggggcagcagaatcagcaaaaatgccagcattaccagttgtcgtaatgagcggggaaaaacgggccagcgtttcaaggtgttactctcgtcagacgcgaatagcctgatgctaaccgaggggaagttcagatacaacaaagccgggaattacccggctttgttatggaataaggcggtgcctaactcgacgtttcgcccgatggttgatatagctacgctgatatcagaagttggacggcaggcaccttgttgtgcgtcattcgaattttatgtagcacgtccctaaggggctgacataagtcggtgaatgagccactgattactattatgcagtaactgtgccaataaagaaaatagtttggtaacgtactgattatacgttgctttgaggggtttatggcttccccgctatttgaatgtaaatcagccactgtgtcgctaaaaagagacaacttaagaaaaacttattagattacaataaaatcaatcatttaagtgtcgccagaaagcgacacggtaaaccacccattgtcgtgatttacagacacaaaaaagctcccgaagttgggagcttataatagcggttgtatttaatgccggatgcggcgtgaatgcctcatccgggctgcaaaaccaatgagtttgacggcttaccccaactgcttacgtgcattgcggaaaatgcgcatccatgggccatcctcgccccagttttcaggatgccaggagttgctgacagtacggaaaacacgttccgggtgcggcatcataatggtgactcgaccgctttcagtcgtgaccgccgtaataccgttcggagaaccgttcgggttagccgggtaggtttcagtgactttgccgaagttatcgacatagcgcagtgccaccagccctttgctttccagtgccgccagatgcgccncatcacgcacttccacgcgcccttcaccatgagagacagcaatcggcatttgcgagcccaccatcccctgcaacagcagcgacgggctttgggtcacttcaaccaagctgaaacgcgcttcaaagcgatcggaggtattgcgcacaaaacgtggccacaactcactacctgggatcagttcacgcagattagacatcatctggcaaccgttacatacccccagcgccagcgtttgcggacggtggaagaaggttgcaaactcatcgcgtacacggtcattgaacaggatagacttcgcccaaccttcaccggcacccagcacatcaccgtaggagaaaccaccgcacgcgaccagggcgtggaaatcctccaggcccgtgcgtccagccagcaggtcgctcatatgcacgtcgatagcatcgaagcctgcacggtggaaagctgccgccatttcaacatgcgagttcacgccctgctcacgcagcacagcaactttcggacgtgcgccagtggcaatatacggtgctgccacatcttcgttgatatcaaacgacagtttcacattcaggcccggatcggcgtcgtttgatttcgcctgatgctcctgatcggcacactccgggttgtcacgcaggcgctgcatctgccaggtagtttctgcccaccagacacgcaacgtagtgcggctttcgctgaatacagtctgcccgttggcggtaatcacaaaacggtcaccggaaaccgcctgcccaacataatggacgcaatcagcaagcccatgctgtgccagtacggactcgaccgcttcacggtcagcggcacgaacctgaatgaccgcacccagttcttcgttaaacaacgccgccaggcgatcgtcacccagagtggcgatatccgcgtcaatgccgcaatgaccagcaaaggccatttccgccagcgttaccagcagaccgccatcagagcggtcgtgatacgccagcaacttacgctgtgcaaccagcgcctgaatcgcgtcatagaagcctttcagttgcgcgacatcgcgtacatctgccggtttgtcgccaagctgacgataaacctgcgccagcgccgttgcgcccagcgcgttattgcctttgcccaaatcaatcagcagcagtgcgttatcttcggtagaaagctgcggcgtgatggtgtgacgtacatcttccacgcgggcaaatgcagaaatcaccagcgacagcggcgacgtcatttcgcgctcttcgttaccttcctgccagcgggttttcatcgacatagagtctttacccaccgggatcgtcaggcccagcgccggacaaagctcttcgcccacggctttaacggcttcatacaggcccgcatcttcaccagggtggcctgccgccgccatccagttggcggaaagtttaatgcgtttgatatcgccaatctgtgttgcggcaatattggttaacgcttcaccgaccgccagacgggcagaggcggcgaaatccagcagcgcaaccggcgcacgctcgccaatcgccatcgcttcaccgtagtagctgtcgaggctggcggtagtgaccgcgcagttagcgaccggcacctgccacggccccaccatctgatcgcgcgccaccatgccggttacgctgcggtcaccgatggtcaccaggaaagttttctccgccacggtcggcagatgcagtacgcgtttcaccgcgtctgcaatggtgatcccttcacggaccagcgcatcgcccttcgctttcagcgtttgtacatcgcgggtcatcttcggcgttttaccaagcaggacgtccagcggcagatcgatcggctgattatcaaaatgacgatcgtgcagagaaagatgcagttcttcggtcgcttcaccaatcaccgcgtagggtgcgcgctcacgcttacacagttcgtcaaacagcggtaattgatcggcagcaaccgccagcacgtagcgttcctgggattcgttacaccagatttccagcgggctcatgcccggttcgtcgcttagaatatcgcgcagttcaaatttaccgccgcgcccgccgtcgctcaccagttccggcatcgcgttagaaagaccgccagcgccgacgtcgtggataaacaggattgggttggcatcaccaagctgccagcaacggtcgatcacttcctggcagcgacgctccatctccgggttgtcgcgctgtacggaagcaaagtcgaggtcggcatcagactgacctgacgccatggaagacgccgctccgccgccaagaccgatgttcattgccgggccgccgagaacgaccagtttcgcaccgacgttgatctcgcctttttgtacgtgatcggcgcgaatgttgccgatcccgcccgccagcatgatcggtttgtgataaccgcgcagctcttcgccgttgtggctgttcactttttcttcataagtacggaagtagccattcagtgccggacgaccaaattcgttgttaaacgccgcgccgcccagcgggccttcggtcatgatgtccagcgcggtgacaatgcgctcaggcttaccgaaatcttcttcccacggctgttcgaagccaggaattcgcaggttggaaacggagaaaccaaccaaacccgctttcggcttcgcgccgcgcccggtggcaccttcatcgcggatttcaccgccggaaccggtcgccgcgcccggccacggagaaatcgccgtcgggtggttgtgagtttcgactttcatcagaatatgcgccggttcctgatggaaatcgtagcggcccgtttcgtggtcagcaaagtagcggcccacttcagaaccttccattacggcggcgttatctttataagcagagagaacgtgatctggcgtggtttcgaaagtatttttgatcatcttgaacagcgatttcggctgctgttcaccgtcgataatccagtcggcattaaaaattttgtggcggcagtgctcagagttcgcctgagcgaacatatacagctcgatgtcgttcgggttacgaccaagctttgtgaaagcatcctgcagatagtcaatttcatcttccgccaganccaggccaagacgcaggttagcgtcgatcagcgcctgacggccctgccccagcaaatcaacgctggtaaccggagtcggttgatggtgggcaaacaactgctctgcatcatctaaagcaaaaaagaccgtttccatcatgcggtcgtgcagttcagcggtaacctgctgccattgttcattggtcagcgtaccggcttctatatagtaagcaacgccgcgctcaaggcggtttacctgttgtagcccgcagttatgagcaatatcggtcgctttcgaagaccagggagagatggtgccaggacgcggggtcaccagcaggagtttgccttgcggggcgtggctggcgagtgccgggccatatttcagcaggcgttcaagttgtgcgtgctcatcatcgtttaacggcgcattgaggtcagcaaaatggacatactcggcgtaaatattgtgaaccgggagcctggcagcctgaaaacgtgccagcagtttgttgattcggaatgccgacagtgcaggcgaaccacgcagaatttccatcataagtctctcgtcttctaagctttcggtgtacccaaggggggaaacgggcgtcattataaagaatctgatgcgctgacgaaaccgtttgcgtggaaataaaatcaccatcgtgaattagcaacgcgtgccgccaatggctgtaataagttgccatctggcgcaggtttacgcaaaatgccgctcatttatgagtaaacctttcactattattacattttttcaagctgggacgcgcacgacacagagaattaactaattgaaaaaattaaagattaattatctgttcatcggcattctggcactgctgctcgcggtcgctctctggccatccattccctggtttggtaaagccgacaaccgtatcgccgccattcaagcgcggggagagttgcgtgtgagcaccattcatactcccctgacgtataacgaaattaacgggaaaccttttggcctggattacgaactggcgaaacagtttgccgattacctcggcgtaaaactgaaagtgaccgtgcggcagaatatcagccagctgtttgacgacctcgataatggtaacgccgacctgctggcggcaggacttgtctataacagtgagcgggtaaaaaattatcagcctggccctacctattattccgtgtcacaacaactggtttataaagtgggtcagtatcgcccacgtacgctgggcaacctgacggcggagcaactcaccgttgcaccgggtcatgtggtggttaacgatctccagaccctgaaagaaacaaaattcccggaattaagctggaaggtagacgacaaaaaaggctctgcggaattaatggaagatgtcatcgaaggaaaactcgattacaccattgctgattctgtcgccatcagcctgtttcagcgcgttcacccggagctcgccgtagcgctcgatatcaccgatgaacaaccggtgacctggtttagcccgttagatggcgataataccctttccgccgccctgctcgacttcttcaacgaaatgaatgaagacggtacgctggcacgcattgaagagaaatacctggggcatggcgatgattttgattacgtcgatacgcgcacatttttacgcgccgtcgatgcggtactgccgcagttaaagcccctgtttgagaaatacgccgaagaaattgactggcgtttgctggccgctattgcttatcaggaatcgcactgggatgcacaggccacttcaccgacgggtgtgcgcggcatgatgatgttaaccaaaaataccgcgcaaagcctcggcattacggatcgtaccgatgccgaacagagcatcagcggtggcgtgcgttatttgcaggatatgatgagtaaagtgccggaaagtgtgccggagaacgagcggatctggtttgccctcgctgcgtacaatatgggctatgcgcatatgctggatgcccgcgccctgacggcaaaaaccaaagggaatcctgacagttgggctgacgtaaaacagcgtctgcctttacttagccagaaaccctattacagcaagctgacttacggctacgctcgtgggcatgaagcctacgcttatgtcgaaaatattcgtaagtatcagattagcctggtgggttatctgcaagagaaagagaagcaggctacagaagcggcgatgcaactggcgcaggattatccggcggtatcgcctacggagttgggcaaagagaaatttccttttctctcgtttctttcccagtcgtcatcaaactatttgacccattctccctctctgctgttttccaggaaagggagtgaagagaaacaaaattaatccgtcgaggattgcgcttttttctgcgctttaatttcctggcggcgcatgcgaaagaagtcactgagcaacgccgcgcactcatccgccagtattccttccgtaatttccactcggtgattcatacccggatgatgcagcacatccattaaagatcccgcagcgccagttttcgcgtcacgcgcaccaaagaccacgcgaccaatgcgactgtggatcatcgctccggcacacattacacatggttcaagcgtgacatacaacgtggcgtcgatcagacgataattttgcatcaccagaccgccctgcctcagggccatgatttctgcatgtgcggtgggatcatgtcgaccaatcggacggttccagccttcgccaataacacgattgttatgcactaataccgcgccgaccggtacttcccgctcatcccaggcacgcttcgccagcgtcattgcatgacgcatccagtattcgtggctaaattcgacttcagacaaaaagaaaactccggttataaaagcgcggcgcattatacacggacgctatgctttactctattccagttgctggagttcaccgcgcggggttactcgccagcgatgctggcaaaagtaaagcagcgggttgtcctgattactgtcgctatagccactgtacagccgcagcggcgtgccgattttgcgctccagttgcgcgaccttttcatgcccgaggcaacgcatcgtcaatacccaaccaccatagccacgctgaatttggctggcgataagattcacccgcggcagccagggtgtatcgaaatagaccgcttcaaccagcggctgtggagaaccggtaatcaaccagatatcagcatcggaacttaacaggtaggtggttaatcgctcctgaaccagcggaaaggcggtaacattgtcacgaaaccagcgtacgaaatcggcctgcaacgcctgtaaacgtgcttcgctgtgaccaaaggtgcatccccacagaagcagactcatcggccagcgtgccgcacgaccttttatcaataacgcaatggctataatcggcaacaacggcaggacaagtaacgcattcagcggttggcgacgcagtaaatagcgcagaaaactgccgaacatatcctgctgatgcaatgttccatctaagtcaaaaaacaccacacgacgctcgtgagttgccaaaccatactcctctggactgaaacatcctgattaattttcgctactacatagcctaacagatagatcatcacttttccggcaacaatcgaccgcatcatggctaactggaatttttaattcatggcaattagcggcaatggaatataaaattcactcgcgtgtgtctcatattgcctgttgtcgccactatttcatcgcgaggaaagatatgaacggcttacttcgtatccgtcagcgttaccaggggcttgcccagagtgataaaaaactggcggattatctgctgctacaacctgatacggcgcgccatttaagctctcagcaactggccaacgaagccggagtcagtcagtccagcgtcgtgaagttcgcgcaaaaactcggctataaaggttttccggcgcttaagttggcgttgagtgaagcgctggcaagccagccggaatcgccctcagtgcccattcataaccaaatccgcggtgatgatccgttacggctggtcggcgaaaaactgattaaagaaaatactgccgctatgtacgcaacgctaaacgttaatagtgaagagaaactgcatgaatgcgtaacaatgttgcgctctgcgcggcggataattctgaccggtattggcgcttcgggtctggtggcgcaaaactttgcctggaagctgatgaagattggcttcaatgctgccgcagtgcgcgatatgcatgcgctactcgctaccgtacaggcgtcgtcccctgacgatctgttattagccatttcttacaccggtgtacgacgcgagttaaacctggcggcagatgagatgctgcgagtgggcggaaaagtgctggcgattaccggctttactcccaatgccctgcaacagcgtgcttctcattgcctgtataccattgccgaagaacaagcgacaaacagtgcttcaatctctgcttgtcacgcgcagggaatgttaacggatttgctgttcattgcgctgattcagcaggatctggaactggcaccagaacgtattcgtcatagtgaagcgctggtgaaaaaactggtctgagtaaagaatgcgcgtataatgcccgcccggtttgtgttgttttgagagtttccttatggcgctgttaatcactaaaaaatgcatcaattgtgatatgtgtgaacccgaatgcccgaatgaggcgatttcaatgggagatcatatctatgagattaacagcgataagtgtaccgaatgcgtagggcactacgagacaccaacctgccagaaggtgtgcccgatccccaatactattgtgaaagatccgcaacatgtcgagacagaagaacagttgtgggataaatttgtgctgatgcaccacgcggataaaatttaatattctactctggaagtagagtattaattattttactgggaagccttaacgcccattatatttatttaattgatgacattagcataataattcactaagttaatttatatagtatctgcccagacacttatttatagttattaaaggcgcgtccgattggttcaccggacgcaccttaagtacgtttccttgtgttataagaacagaaggatcagctgtaaaacagcaatgatgattttgatgacccgtttaatcaggtatcggcaatcagtcattcgtttttccttaaacaaggaatgcagccgttcagattagcccttacatctccccaaaactgaacgtgcgagttattggaatcgagtgctgcactccacaccagagctttgacgacaccactcgtttcaatgggggaattcagtggcatggtgtaaagcacagcaaaattgccaataacgaaaccgattttaatgtacttatcaaaaagcggtcacgttaatcttttcatcaatgtcgatttcttcgtaaaggctcgcgttttttatgtcagagattgcaagttgcttgtacaggtcaacgaaattgatccataatcattttcgttggaatcgtgtgctgcacaaaattaaagttaaaaagtaaaacccccgttccttaccagttcgggggttttactttataaagagaacggtattatttttaactttcaataattaccgtggcacaagcatagtggcgctcatcggccagcgtcacatgcatatttgcaacgcccagcttttccgccngttttaatgcctcgccccacagtcgcagccgtggcttaccaagctcatcgttaaatacttcaaactgattaaacgccagaccattgcggatcccgatgccaaacgcttttgctgcggcttcttttacggcaaagcgtttcgccagaaaacgcaccggctggtggtgcgttttccaaatttcccattcgttatcgcttaatacgcggcgtgccaggcgctcaccggatcgggcgatcactgcttctatgcgagcgatctctacgatatccgtgcctaaacctaatattgccattagccacgcgcttccagcatcaggcgcttcatttctgccaccgcatctttcagtccggtcatcactgcacgaccaataatggcatgaccgatattcagttcgtgcatctcagggatggcggcaatggcttttacgttgtgataggtcagaccgtgtccggcgttaactttcaaaccgagactagcggcaaaggtcgcggctttggcgatacgcgccagctcttgcgcctgttcggcgtcagttttggcatcagcatagcaaccggtgtggatctcgataaacggtgcgccaacctctgccgcagctttgatctgctcttcatcggcgtcgataaacagagaaacctgaatcccggcatccgccagacgtttgcaggcatcgcgcattttgtcacgctgccctgcaacgtccaggccgccttcggttgttacttcctgacgcnnnnctggtaccaggcagcaaaaatgcggcttcgtctcaaccgcgatcgccagcatctcttcggtcaccgccatctccagattcatgcgggtatccagcgtctgacgcaggatgcgcacatcgcggtcagtaatgtggcggcgatcttcacgtaaatgcacggtaatgccgtccgcccccgcctgctcggcaataaacgcggcctgcaccggatccgggtaagcggta

SEQ ID NO: 1371 - DNA, 12133 bp, Escherichia coli
  Strain O55:H7
  modified_base (17)..(17): a, c, g or t
  modified_base (1607)..(1607): a, c, g or t
  modified_base (2216)..(2216): a, c, g or t
  modified_base (8003)..(8003): a, c, g or t
  modified_base (9360)..(9360): a, c, g or t
  modified_base (11525)..(11525): a, c, g or t
  modified_base (11678)..(11678): a, c, g or t
cgcgttgcgcagcgtancgatatggtcaatgttgacgcctaacagtaattcagccatgacaatcctcatcattcataatgtgttttcaccgttcgcttaggcataaattgccggaacagttccctgctctttaaaggtttaccgccaagatacggcttaagcgccatgcgggtaaagcgtttcgcggcgcgcagtgtgtctgcgtcaggaaattcccgtgcgtttaacgcttttaactgccttccggtgaacgttttattgtcgataacgacgcttgcgataaaccctttttcttcgcgataacgatacgtcatggtgtcatctaccggctcgccgctacccgcacaatgggtaaaattgacgccataacccagatgcccgagcagtgccagttcaaagcggcgcagcgcgggttctggcgtaccagtgacccctgcaagagactgaatgcagtgcaagtaatcgaaaaagagttcagagaagcgcgtctcgtattccagtacgcgggagagaagttcgttgatgtacagaccgctgtaaagcgtgataccgcttaatggcagcgccagcgagacagcttcagcactgcgcagcgttttgacttcgccacgcccgccaaaacgtagcaagagaggggtgaaaggctgtaatgcacctttcagggtagagcgtttagagcgtgcgcctttggcaaccagacgcacgcgacccgattcctccgtgaagacgtccagcatcaggctggtttcgctccacgggcgactatgcaggacaaatgcgcgctgccagccttccatcggagttactcttaaagatcgtcaacgtaaccgagactgcgcagtgcgcgttcgtcgtcggcccaaccggatttcacttttacccacagctcaaggtgaacaggcgcttcaaacatttcctgcatgtctttacgcgcttcaatcccgatggttttgatcttggcccctttgttgccaatgaccatcttcttctgcccttcacgctcaacgagaatcaaaccgttgatgtcataaccaccgcgttcgttagagacgaaacgttcgatctccacggtcacggagtacggcagttcagcgccgaggaaacgcatcagtttttcgcggatgatttcagacgccataaaacgctgtgagcgatcggtgatgtaatcttccgggaagtgatgagtcgcttcaggtagatgcttacgcacgattgccgcaatagtggcaacattcagcccggtttcggcagagattggcacgatatcgaggaagttcatctggcttgccaggaactgcaggtgcggcagcagatcggctttctcctgcacgttgtccactttgttcaccgcgaggattaccggcgctttgccttcgcgcagtttgttgagcaccatttcgtcgtccggcgtccagcgggtgccttcaacgacaaaaatcaccagctcaacatcgccaatagagctgctcgccgctttgttcatcaggcggttaatagcgcgtttttcttccatatgcaggcccggtgtatcgacgtagatcgcctgatacgcgccttcagtatggatccccacaatgcggtgacgagttgtctgcgccttgcgggangtgatggagattttctgccccagcagtttgttcaacaatgtggatttgccaacattcggacgtccgacgatggcaataaatccgcagtaacttttatcgatgctcattccagctccagttttttcaacgcctgttcggcggcagcctgctcagccttacgacggcttgaacctgtgccaaccaccggttcactcaggccgctgacctggcagtggattgtaaattcctgatcgtgcgcttcgccacggacctgaactaccagataagtcggcagcggcagatgacgaccctgcaaatattcttgcaagcgcgttttcggatctttttgtttatcgcctgggctaatttcgtccagacgagtttgataccagttgaggattaatttctcgacggtttgaatatcactgtcgaggaatacgccaccaattaatgcttcgacggtgtcggcgagaattgactcacgacgaaatccaccgcttttaagttcacctggtcctaaacgtaagcactcgcctaactcaaattcgcgcgccagttccgccagcgtattgccacggaccagcgtggcgcgcatccggctcatatcgccttcatccacacgagggaaanggtgataaagcgcattggcgataacgtagctcagaatagagtcgcctaaaaattctaaacgctcgttatgtttgctgctggcactacgatgagttaatgcctgctgcaacagttcctgatgattaaaagtgtagcccagcttccgttgaagccgattaattacgatggggttcatgcgataccaataaataaatgcgtcaacaattcagcacacgaaacagacctgatatacatggctctgctaactgcttcgctgcagtttcagtttagcggtatatggggaccaacgctgtttcgtgtgccgtggcaacctggaggtgccaaccttaaacttcgggggaatattctatacacaacgacgggggatgtcgttagccacgggagatttatctcataaataattcacgttgtcgccataacggcgacaacgtgaacgaagatgagctattaatggatgccgccaatgcgacttaagcgcacacctgtcggccattcgccttcttgcttatcgaagctcatccagatagccgttgcccgaccgaccagattcgcttcaggcacaaagccccagtaacggctgtccgcgctgttgtcgcggttgtcgcccatcatgaagtattgtcccggaggaacaatccaggttgccagttgttgccctggctgctggtaatacatccccacctgatcctgcgcaatcggcactgtcagaatgcggtgcgtcacatcacccagtgtctctttacgctcggaaagacgaattccattttctttggtttcgtttttcggcacttcaaagaatccgctggtcgcttccccaccattacggcgtgagaaggtctgaacgaaatcgctcggttccacgtttgagtaggtgaccggcagcgcgttttcacacgcctggccggaactgcatcccggttgaatcgtcagctcttttgagaccggatcgtaagtgactttatcgcccggtaaacccaccgcgcgcttgatataatcaagctttggatcttccggatatttaaagaccacgatatcgccgcgtttcggatgaccggtttcgatcagcgttttctggtagataggatctttaatgccataagcaaacttctctaccagaataaaatcaccgattaacagagtcggcatcatcgaacctgacggaatctggaacggttcataaataaacgaacgcacaatcaatacgatagccagtaccggaaaaacagaagcaccggtttccagccagccaggcttcggcgcaacctttttcaacgttgctttatccagtgagtcaccggcagccgcctgcgccgctgcctgacgttcccgccgtttaggtgcgaaaaagaatttatccacgcaccataaaatgcccgtcaccagtgtggcaatcaccagaatcagggcaaacatattcgccatgccaactcctaagggttatttgttgtctttgccgacgtgcagaatggcgaggaacgcttcctgcggcagctcgacgttaccgatctgcttcatgcgtttcttaccttctttctgcttctgcagcagctttttcttacggctgatatcgccgccataacatttagccagtacgtttttacgcagctgtttcacggtggatcgcgcaataatgtgcgtaccaatcgctgcctgaatggcgatatcaaactgctggcgtgggatcagatctttcatcttctccaccaactcgcgaccgcggttttgcgaattatcacggtgggtgatcaacgccagcgcatcaacacgttcaccgttgattaatacgtctacacgtaccatgtcggacgcctggaagcgtttgaagttgtaatccagagacgcataaccacgcgaggtagatttcaggcgatcgaagaagtcgagcaccacttccgccatcgggatctcgtacgtcagcgccacctgattaccgtggtaaaccatattggtctgcacgccgcgtttttctacgcacagcgtaataacgttgccgagatatgcctgcggcagcagcatgtgacactctgcaatcggctcgcgcagttcgtaaatgttatttaccgcaggcagcttggatgggctgtcgacgtagataacttcccttgacgtggtttcaacttcatacactacggtcggcgcagtggtgatcagatccagatcgtattcacgttccagacgctcctggatgatctccatgtgcagcaggccaaggaagccgcagcggaaaccaaagcccagcgcgctggagctttccggctcatagaacagtgaggcatcgttcaggctgagtttacccagcgcgtcacggaaggcttcatagtcgtcggaacttaccgggaacagaccggcgtatacctgcggtttgactttcttaaagccaggcagcgccttttctgccggattacgcgccagcgttaaggtatcgccgactggagcgccgtggatatctttaatcgcacatacgagccagcctacttcgccacatttcagttcagtgcggtcaacctgtttcggcgtgaagatgcccagacggtcggcgttataggtctgcccggtactcatgactttcactttgtcgcccttacgcagggtgccgtttttaatacggataagtgaaacaacgcccaggtagttgtcgaaccatgagtcgataattagtgcctgcaacgggccttccggatcgccttccggcggcggaatgtcgcgcaccagacgttcgagaacgtcctgcacgccaacgccggttttcgctgaacagcgcaccgcgtcagtggcgtcgatgccgacgatatcttcaatttcttccgccacgcgttcaggatcggctgccggcaggtcaatcttgttcagtaccggcaccacttcgagatccatttccatggcggtgtagcagtttgccagggtttgcgcttccacgccctgcccggcgtcgaccaccagcaatgcaccttcacaggcagccagcgaacgggaaacttcataggagaagtctacgtggcccggggtgtcgataaagttaagctgataggtttcgccgtcagacgctttgtagtccagcgtcacgctttgcgctttgatggtaatgccacgctcacgctcaagatccatggaatcgagaacctgcgcctccatttcacggtcagacaggccaccgcagatctggataatacggtcagacagcgtcgatttaccgtggtcaatgtgagctatgatcgaaaagttacgtatattcttcataaagtatgattattgtgccttaatgcccggttaaccaggcttttagaagtcgctgttctgagcttaacgtctgtattaatagaaacgccgcattctacactacaacattgaggcgaggaaatgttcataccgtatggattgtggtatctggaaacgtcctcgcatttgttatgcaaaatgcaacaaagccagtgaaatcactggctcgcgtcttccgaagatgtttcaaatcgcacaaggccaggcggcaatgccacgcttaagatgatcggttgccattctgcccgggcagcaaacttacgcgagtagccacgcgcaatcaggaacccgccaataccgccgaggaccgcaccacataatgctgcgacgtcagaagcaaagagtagctgaaatagcgaagcgatgaggaataatcccaccagcggcgacatataaaccagtaatgcggagctaagcaggctgccttcggcgatccccaattccactttttgccccggcactaacggctcatcacagggtacgacaatggtatgcgtggtttgcgggccaagtttattcaacacgcggctaccgcaaccggcgcgtgaagcgcagctgctgcatgaggctttaacatcacaactgaccagcgcctgcccgttttgccaggagacgacggtagcccactctttgatcattgcgctgccccgaacttaatattctcggcaatgcgtttcgccgtttgcggcggcagttcaccgacaatggtgatttcggcgttatcacgtacgcttgtactgacggttctgcgtccggtgcgcaacatctgatcggtgctcgatggcgtagcgcggttaacgtttaccgagaagctgaataatccgtcggaatagagacgtgattcgataggcatgttgtccatcgtcggtagcggacgtcgactactggaaacttcgctaaaaccctgtggcaaccaggttggcgtccagctgaatttagctttttcacctacaggaacagaaagcaacggcggcaaatttgccttcgccagcgtctgcatactgctgctgatatcctgattgacgttaaaagcaatcacgcgaaattgttccagcgtttcaccatcgcgatcaagaagatcaacccgcatcggtaatttcgattcggtgtccatccacacgatgtagctgtagcgtgtaccatctcgggcaaccacgcgaatgacttcgcaaagacgatcagcaatacgcgtgcgcccgacggagataaagtcgtagtaaggagaaaggcgtttgaaatcggtatagatgagcgatggcagagaatcaacaatgtaatcgccattaagcgtgaacggttcaagtcccggttcaaaatagctgatttcattgccgcgctgtaccacttcccggcgcgggccatccatttgcaacaattgtgcaagaggacggttatcgaggcgtgcatgtcgataacgcagagactcaacaccctgtttattgatgctgatgaatgacagctcgtaattcagtgactgactggccaggttcatctgctgtaataacgccccggacgcgggagtggccgaggcgttagcagagaataacaggctacctgtcactaatgacatggcaaaccaaagttgcttcattactgcgattgcgttcctaaagtttgaattcctggcacctgtacagcggcttgctgggtttgcgcctgctcaaactgaagctgttcagagtggagtcggcgttgcagttcgtaatcctgcaacattgcattaatgcgacgacgctgctgctgttgaccattatttgcggtcgcttcagaaggtactcccaggctaaccgggctggctttacccatcatcggcagtgtattaaataccggcgtttcgggctgctgggacgtttcagattgtccattatagtgctggacgccaacgataactgcaagcgatacgcatgcggctacgcccatttgggtaagctgtgccgcccacggacgtactttctgccagaatggcattttctgccattcatgcggcgcaggctgggcttccgggatcaatgtcgccggttgacgtactggctcttcttcaatggcggccatcacgcgtgaagagatatcgaaatggagcacctcgggagtatcaccccgcattgagtcacggattaagtgatagctttcccaggttttctgcatttctgggttatgagccagttcgttaagcagctcactatccagcgtttcgccatccattaaagcggaaagttgttctttctgcatgcctaatacccttatccagtatcccgctatcgtcaacgcctgataagcggttgaactttgttatcaatagcttccctcgctcggaagatacgtgaacgcaccgtacctaccggacaatccatgatagcggctatctcttcatagctcaggccatccagctcccgcaaggttattgccatgcgtaaatcttccgggagggactcaatagttcggaaaactatctgtctcagttcttctgacaacattaagttctcagggttcgaaatttctttcaacgcgccnccactttcgaagttttcagcttcaatggcatccacatcactggaaggtggacgacgcccctgagcaaccaggtaatttttcgctgtatttacagcaatccgatacagccatgtataaaaagcgctatctccccggaacgaatccagcgcacgataggctttaataaaagcttcttgtaccacatcgggaacatcacccgacggcacatagcgggaaaccagactcgccactttatgctgatagcgcactaccagtaagttaaaggctttctgatctcccttctggacccgttcaaccaggacctggtccgttaactgctcgctcatccgaggtaaagtctccccaaaccaaatttccacgcgctatcgaaacgccactccattagctgcaatttgagcaagcaaagggttagagtgtctcgtttttgtaaagttccgtaacgcatctgtttttgtttgtcatgctgtagacggatcattatctatcattataagtctacagaatctgaacatcgcattatctgtgtagaaatgcccatttaactgcctgaagagtaacccaacggcctttttatttcaccacctaatcctccaccagccagtaacttctctttttctcgccgccctgcgtcagcgtgtttagccactgtaacaaatattaaaatagcaggtgtttattcgcacaacatgatgctatgctgaccaaaccgtgtttagtaaattaaacaaagaaaatgaatactctccttgaacattcatgtgacgtgttgattatcggtagcggcgcagccgggctttcactggcgctacgcctggctgaccagcatcaggtcatcgttctaagtaaaggcccggtaacggaaggttcaacattttatgcccagggcggtattgccgccgtgtttgatgaaactgacagcattgactcgcatgtggaagacacattgattgccggggctggtatttgcgatcgccatgcagttgaatttgtcgccagcaatgcacgatcctgtgtgcaatggctaatcgaccagggggtgttatttgatacccacattcagccgaatggcgaagaaagctaccatctgacccgtgaaggtggacatagtcaccgtcgtattcttcatgccgccgacgcaactggtagagaagtagaaaccacgctggtgagcaaggcgctgaaccatccgaatattcgcgtgctggagcgcagcaacgcggttgatctgattatttctgacaaaattggcctgccgggcacgcgacgggttgttggcgcgtgggtatggaaccgaaataaagaaaaggtggaaacctgccacgcaaaagcggtggtgctggcaaccggcggtgcgtcnaaggtttatcagtacaccaccaatccggatatttcttctggcgatggcattgctatggcgtggcgcgcaggctgccgggttgccaatctcgaatttaatcagttccaccctaccgcgctgtatcacccacaggcacgcaatttcctgttaacggaagcactgcgcggcgaaggcgcttatctcaagcgcccggatggcacgcgttttatgcccgattttgatgtgcgcggcgaactggccccgcgcgatattgtcgcccgcgccattgaccatgaaatgaaacgcctcggcgcagattgtatgttccttgatatcagccataagcccgccgattttattcgccagcattttccgatgatttatgaaaagctgctcgggctggggattgatctcacacaagaaccggtaccgattgtgcctgctgcacattatacctgcggtggtgtaatggttgatgatcatgggcgtacggacgtcgagggcttgtatgccattggcgaggtgagttataccggcttacacggcgctaaccgcatggcctcgaattcattgctggagtgtctggtctatggctggtcggcggcggaagatatcaccagacgtatgccttatgcccacgacatcagtacgttaccgccgtgggatgaaagccgcgttgagaaccctgacgaacgggtaataattcagcataactggcacgagctacgtctgtttatgtgggattacgttggcattgtgcgcacaacgaagcgcctggaacgcgccctgcggcggataaccatgctccaacaagaaatagacgaatattacgcccatttccgcgtctcaaataatttgctggagctgcgtaatctggtacaggttgccgagttgattgttcgctgtgcaatgatgcgtaaagagagtcgggggttgcatttcacgctggattatccggaactgctcacccattccggtccgtcgatcctttctcccggcaatcattacataaacagataaaaagcctgggttagcgccgtatacgcttcggaatagttctggtctggcccacgaatgactaagcgatcgctaaagcattctcccgcctgcggggagaatgccagcagcacccgatgcggcagtcgcgcttcgttttccgccacatccgtccgcaaacgtaaatgccagcccatacttaatgccagctccgtaaaactattaccaatctgctctggcagcaccacgcagaaaaatccctcttcggtaatgcactccgccgcgcaagtaagtaaagtctggtgatcaagtgaggtggtgtagcgcgcctgttcccgctgcggcgtcgcgcactccactccttgctcataatacggcgggttgctgatgattaaatcaaagcgcgcggtctgctgtgttacccactgctgaatatccgccgtatggacgttaattctctctaaccacggggactgggcgacattttcctgcgcctgagtggcagcttcactttccagctcaacggcatcaattatcacgctgtcactggttcgctgcgccagcatcagtgccagcaagccactacccgcaccgatatcaaggcaacgttttaccccagccaccggtgcccatgcgcccagcaatatgccatccgttcccactttcatcgcacagcgatcgtgagcaacaaaaaactgtttaaaagtaaatccattacgacgaagcacggatgtagactgtgacatgaaaataaaaccttgcaggaaaaacggcgatagcaccgggtgagaacaatacccgagaagcgatatccatacaaacagatgaagattgcagccgtaacgtctataatcagcgccccacacagaggtagaacatgactgtaacgactttttccgaacttgaactcgacgaaagcctgctggaagccctccaggataaaggtttcactcgcccgaccgccattcaggctgccgccattccgcctgcgctcgatggccgtgatgtactcggttctgcgccgacaggcaccggtaaaacggcggcgtatctgctgccagcgttgcagcacctgctcgatttcccgcgtaagaaatccggtccgccgcgtattttgatcctcaccccaactcgcgagctggcgatgcaggtggccgatcatgcccgcgaactggcgaaacatacgcatntggatatcgccaccatcaccggcggcgtagcctatatgaaccacgcggaagtgttcagcgaaaatcaggacatcgtggtcgccacgaccggacgtctgctgcaatacataaaagaagagaacttcgattgccgcgcggttgaaacgctgatcntcgacgaagcagaccgtatgctggatatgggcttcgctcaggatatcgaacatattgctggcgaaacgcgctggcgtaaacagaccctgctcttttcggcaacgctggaaggcgatgcgattcaggactttgccgagcgtctgctggaagatccggtggaggtttctgccaatccgtccacccgtgagcgcaaaaaaattcatcagtggtattaccgcgccgatgacctggaacataaaaccgcattgctggtgcatctgttaaaacagccggaagcgacccgctcaattgtgtttgtgcgtaagcgtgagcgtgtgcatgagctggcaaactggctgcgcgaagcgggcatcaacaactgctatctcgaaggtgagatggtacagggcaagcgtaacgaagcgatcaaacgtttgaccgaaggtcgcgtaaacgtactggttgcaaccgatgtt

SEQ ID NO: 1372 - DNA, 4109 bp, Escherichia coli
  Strain O55:H7
  modified_base (2287)..(2287): a, c, g or t
  modified_base (2359)..(2359): a, c, g or t
  modified_base (2743)..(2743): a, c, g or t
  modified_base (3880)..(3883): a, c, g or t
  modified_base (3914)..(3914): a, c, g or t
  modified_base (4070)..(4070): a, c, g or t
cgcggtatcgacattcctgacgtcagccacgtctttaacttcgatatgccgcgcagtggcgatacttatttgcaccgtatcggacgtaccgcgcgcgccggtcgtaaaggcaccgcaatttcgctggtagaagcccatgaccatctgctgctgggcaaagttggtcgctatattgaagagccaattaaagctcgcgtaattgatgagttacgcccgaaaacgcgtgcaccaagcgagaagcagaccggcaagccatcgaagaaagtactggcaaaacgcgccgagaagaaaaaagctaaagagaaagagaagccgcgggtgaaaaaacgccatcgcgataccaaaaatattggtaagcgccgtaaaccaagcggaacgggcgtgccaccgcaaacgacagaagagtaatctcaatgccgggtttaagcccggcattatttttatcccggcaaaaaacaatcttcaacacactgaataaaagtgtgcatcgccgggctaaccgcttttccggcatggtgagcgcacattgccgtaatggtctgcgagtgttcgccaaaaggcaattcaattaattctccgctctcaagctctttttccaccgcaaagcggggcaagtaactgacaccgatattcgccgcgacacaacgtttgatactttcaatgcttaacagctcaatggtgttttccaccgtgatccgccgctggcgcagcgtgctctcaaatatctgccggaatacacattgcggttcgttgataataaagctacaggcgttatgtcttcccggctcagtaaaatcgacatctgcaatttgcggtgaagctaccagcaccagcgattgctcacccaattctcgtcggttcagggcatcatcattccctacgcgataaaaaaccccgacatcggcctcatcattcaatagcgcatcacggatcacgtaacagttcagagactgcaacgataaacgcacttttggggcgcgttgccgaaaacgctgcaacacctgcggcattcggtaagagagcaacgtttcgcccgaaacaacgcgtagttccccgtccggatccgactcctttttggcagcctcacgaagggtatccatcactctggtgagttcataaatgtgcggcagcagctttttaccttcgcgagtgaggcacatccgtcggccaattttctcaaataactgtaccgagaactcctgctcaagctgctgaatatgaaaagtcaccgtcgattgtgtacagcacaatttttgcgaagctcgcaaaaaggaaccctcttccaccacggttttaagcgtaataaaacggcgcagatccataaccccaaacctatcgaaaatatcgaatttagaatgtaaaaacattcatttttttaaatattctgtgtcgggtactgtctaccaaaacagaggagataacaagtgacaccgacccttttaagtgctttttggacttacaccctgattaccgccatgacgccaggaccgaacaatattctcgcccttagctcagccacaacgcacggatttcatcagagtacccgcgtgctggcagggatgagtctgggatttttaatcgtcatgttgctgtgtgcgggcatttcgttttcactggctgttatcgacccggcagctgtgcatctgttgagttgggcgggggcggcatatattgtctggctggcgtggaaaatcgctaccagtccaacaaaggaagacgggcttcagacaaaaccaatcagtttttgggccagctttgctttgcagtttgtgaacgtcaaaatcattttgtacggtgttacggcactgtcgacatttgttctgccgcaaacacaggcgttaagctggatagttggcgtcagcgttttgctggcaatgattgggacgtttggtaatgtgtgctgggcgctggcggggcatctgtttcagcgattgtttcgccagtatggtcgccagttaaatatcgtgctggcgctgctgctgatctattgcgcggtacgcattttctattaatgaaaaaaagcggaagaggtcgccctcttccgcttagtaacatgctacttaagccttacaggctttcagtaaaggtacgagcgataacgtcgcgctgctgttccggagtcagagagttaaagcgaactgcataaccggatacacggatggtcagctgcggatatttttccggatgcttaactgcatcttccagagtttcacgacgcagaacgttaacgttcaggtgctgaccaccttcaacgcgaacttctggtttcacttctactggaacttcncggtactcaatgtcacccagtttgcttactgcaaccacttcgtcttctgcataacctgctttcgcaacgatncaacgcgcttcgcctttttcgctgtccagcagccagaaagagttcagcagatcgtcgttagcggctttagtaatctggatacctgtaatcatgtgatgcctccccggcaaaattatttgatttgttcagcctgtcgcggccaattggtaaaaccattgttgcttgagtgtatatatactcctcaaacacccttgaatctttgatttaaatcaataaaaaccacacatcaagtgtggtcgcaaatggattttattgttttacatcaacttatgcgggtgtgaaattttaccaatttacatttttttgcactcgtttaagtctaaaaaatgagcatgattttgttctgtagaaagaagcagttaagctaggcggattgaagattcncaggagagcgagatggctaacgaattaacctggcatgacgtgctggctgaagagaagcagcaaccctattttcttaatacccttcagaccgtcgccagcgagcggcagtccggcgtcactatctatccaccacaaaaagatgtctttaacgcgttccgctttaccgagttgggtgacgttaaagtggtgattctcggccaggatccttatcacggaccgggacaggcgcatgggctggcattttccgttcgccccggaatcgccactcctccgtcactgctgaatatgtataaagagctggaaaatactattccgggcttcacccgccctaatcatggttatcttgaaagctgggcgcgtcagggcgttctgctactcaatactgtgttgacggtacgcgcaggtcaggcgcattcccacgccagcctcggctgggaaaccttcaccgataaagtgatcagcctgattaaccagcatcgcgaaggcgtggtgtttttgttgtggggatcgcatgcgcaaaagaaaggggcgattatagataagcaacgccatcatgtactgaaagcaccgcatccgtcgccgctttcggctcatcgtggattctttggctgcaaccattttgtgctggcaaatcagtggctggaacaacatggcgagacgccgattgactggatgccagtattaccggcagagagtgagtaaatttgcgggaaaatgccggatggcagagttgccacccggctgatttatcaggctttattctgacgccaccattcgccaagaagaacgccggttgcgacagagatattcagcccggcaacgttgccagtaccatcaatcttcacgcgcagatcgttcggatcgcgtgcggcatccggtaacccttcatattcctgacccagcaccagtaccattttcgctggcagactggttttgaacagcggtttaccctgctcgctggaagttgtcactacggtgtaacccgcctgacggaaatcatccagcacgttaacaatgttgtcgccagtaatcggctgaacgtgctctgcgccgccttctgcggtacggatagccgcccccgactccagcagtgccgcatcctgcaccacaacacctttcacgccaaagtgcgcgcannnncgcatcatgccacccaggttatgcgggttanattcgttttccagtgccagaacacaatcctgcgcgcctgcctggcttacccactgctgcacggttgtgccattacgctttttgatcaggaagcaaacgccaccgtgatgttccgtgcctgacgcttttgtcaattccgcttcatctaccacatggnacgctttgcggtttgctgccatccagcgcaaggcttctt

SEQ ID NO: 1373 - DNA, 6128 bp, Escherichia coli
  Strain O55:H7
  modified_base (6120)..(6123): a, c, g or t
  modified_base (6126)..(6127): a, c, g or t
gcggcgttacactctggataaaccaggcgcgaacaatcgcttccggacggctctggaacagtgcctgacaggcgttttcgccgtagacgcgggtttcttccgcacgctgacgacgcaacacttccggatcaataaaacttttaccactgatgccaccgtgatcggccttttccggcgtctcatcacccggcgcgcgggaaaccgtgcgccacggcgaatcttcccacttgcggtcacggggctgactctgtttgtcatcgcgggcggggcgacggccaccgtcagcacgagattttcctggacgcccgccccctttcccggtacgcgggttgtgggtacgtttatcagaatcatcatcactgcggacatacatcactttgaccttgccgcttttacctttcatttcatcgttcatgcttttctccaccagcgctgcgcgaagcgcgcagattacccgaagtccgcgcggttcgccatgatttcgtaccaaagcctgcgactatcatacctattgaataaaacagattattgtctggaacaatgtccccgataatatgtaacatattagaaacataccggcgttgttgccgataagtctccttactcatcccgaggttagttatgaataccgtttgtacccattgtcaggccatcaatcgcattcccgacgatcggatcgaagatgcggcaaaatgcggacgctgcggtcacgacttgtttgacggagaggtgattaatgcgaccggtgaaacgctcgacaaattgctgaaagatgatctaccagtggtgatcgacttctgggcaccgtggtgcggcccctgccgtaatttcgcaccaatttttgaagatgtcgcgcaagagcgtagcggtaaagtgcgctttgtgaaagtgaataccgaagctgaacgtgaattgagcagtcgctttggaattcgtagtataccgacgatcatgattttcaaaaacggtcaggttgtcgacatgcttaatggcgcagtaccgaaagcgccgttcgatagctggctgaacgaatctctttaatcttaccggggcgcatcttgtgccccgttttctcctctgcgacaatggcgtttttttgacgctctcttatgaccgaaaacgctgttctccagttacgcgccgagcgtattgcgcgcgcaacacgtccttttcttgcccgcggtaatcgcgttcgtcgctgccaacgctgtcttttgccagagaaattatgtctctgttcgacaattaccccagcacaagcaaaaagtcgcttctgtttgctgatgttcgacaccgagccaatgaagcccagtaataccgggcgtctgattgctgatattttgcctgataccgttgcgtttcaatggtcgcgtaccgaaccctcgcaggatttgctggatctggtacaaaacccggattatcagccaatggtggtctttcccgcctcgtatgctgatgagcaacgggaagtgatcttcacaccacctgccggtaagccaccgctgtttatcatgctcgatggtacctggccggaagctcgcaagatgtttcgtaaaagtccgtatctggataatcttcccgtcatttccgtcgatctttcccggctttctgcctatcgcctgcgtgaagcccaggctgaaggccaatattgtactgccgaggtagccatcgcactgttagatatggccggcgataccggggcggcagcagggttaggcgagcacttcacccgctttaaaacgcgctatctggcaggaaaaacgcaacatctgggtagcatcacagcagaacagttagaaagcgtttaaaatcattcggtcacttctgcgggagaccggtatgagtcagcgaggactggaagcactactgcgaccaaaatcgatagcggtaattggcgcgtcgatgaaacccaatcgcgcaggttacctgatgatgcgtaacctgctggcgggaggctttaacggaccggtactcccggtgacgccagcctggaaagcggtgttgggtgtgttggcctggccggatattgccagcttgccctttacacccgaccttgcggttttatgtaccaatgccagccgtaatcttgctcttctggaagagctcggcgagaaaggctgtaaaacctgcattattctttccgccccggcatcgcaacacgaagatctccgcgcctgcgccctgcgccataacatgcgcctgcttggaccaaacagtctgggtttactggctccctggcaaggtctgaatgccagcttttcgcctgtgccgattaaacgcggcaagctggcgtttatttcacagtcggctgccgtctccaacaccatcctcgactgggcgcaacagcgtgagatgggcttttcctactttattgcgctcggcgacagcctagatatcgacgttgatgaattgcttgactatctggcacgcgacagtaaaaccagcgccatcctgctctatctcgaacagttaagcgacgcgcgacgctttgtttcggcggcccgtagtgcctcgcgtaataaaccgattctggtgattaaaagcggacgtagcccggcagcacagcgactgctcaacacgacggcaggaatggatccggcgtgggatgcggcgattcagcgtgccggtttgttgcgggtgcaggatacccacgagctgttttcggcggtggaaaccctcagccatatgcgcccgctgcgtggcgaccggttgatgattatcagcaacggtgctgcgcctgccgcgctggcgctggatgccttatggtcacgcaatggcaagctggcaacgctaagcgaagaaacctgccagaaactgcgcgatgcactgccaggacatgtggcaatctctaacccgctcgatctgcgcgatgacgccagcagcgagcattatgtcaaaacgctggacattctgctccacagccaggattttgatgcgctgatggttattcattcgcccagcgccgctgctcccgcaacagaaatcgcgcaagtattaattgaagcggtaaagcatcatccccgcagcaagtatgtttctctgctgacgaactggtgcggcgagcactcctcgcaagaggcacgacgtttattcagcgaagccgggctgccgacctaccgtaccccggaaggaaccatcactgcttttatgcatatggtggagtaccggcgtaatcagaagcaactacgcgaaacgccggcgttgcccagcaatctgacttccaataccgcaaaagcgcatcttctgttgcaacaggcgattgccgaaggggctacgtcgctcgatacccatgaagttcagcccatcctgcaatcgtatgggatgaacacgctccctacctggattgccagcgatagcaccgaagcggtgcatattgccgaacagattggttatccggtggcgctgaaattgcgttcgccggatattccacataaatcggaagttcagggcgtcatgctgtacctgcgtacagccaatgaagtccagcaagcggcaaacgctattttcgatcgcgtaaaaatgacctggctgcaggcgcgggtccacggcctgttggtgcaaagtatggctaaccgtgctggcgctcaggagttgcgggttgtggttgagcacgatccggtttttgggccgttgatcatgctgggtgaaggcggtgtggagtggcgtcctgaagatcaagccgtcgtcgcactgccgccgctgaatatgaacctggcccgctatctggttattcaggggatcaaaagtaaaaagattcgtgcgcgcagtgcgctacgcccattggatgttgcaggcttgagccagcttctggtgcaggtttccaacttgattgtcgattgcccggaaattcagcgtctggatattcatcctttgctggcttctggcagtgaatttaccgcgctggatgtcactctggatatcgcgccgtttgaaggcgataacgagagtcggctggcagtgcgcccttatccgcatcagctggaagaatgggtagaattgaaaaacggtgaacgctgcttgttccgcccgattttgccagaagatgagccacaacttcagcaattcatttcgcgggtcaccaaagaagatctttattaccgctactttagcgagatcaacgaatttacccatgaagatttagccaacatgacgcagatcgactacgatcgggaaatggcgtttgtagcggtacgacgaattgatcaaacggaagagatcctcggcgtcacgcgtgcgatctccgaccctgataacatcgatgccgaatttgccgtgctggttcgctcggatctcaaagggttaggcttgggtcgacgcttaatggaaaagttgattacctatacgcgagatcacggactacaacgtctgaatggtattacgatgccaaacaatcgtggcatggtggcgctggcccgcaagctcgggtttaacgttgatatccagctcgaagaggggatcgttgggcttacgctaaatcttgcccaacgcgaggaatcatgagtaaggtactggaaatgttgaccacttaatcgggactggtgttattattgcccgcttatgtcgtctgcattgcacagaggacccttcaatgaacagagaagaaatgcactgtgatgttgtcaaaatttaagcgtaataaacatcaacaacaccttgcccaactacccaagatttctcaatcagttgatgatgtcgatttcttttacgctcccgccgacttccgggagacgctgctggaaaaaatagccagcgcgaagcagcgcatttgcattgtcgccctgtatctcgaacaggatgacggtggcaaaggcattctgaacgcgttgtatgaagctaaaaggcagcgtccggaactggatgtgcgggtgctggtcgactggcatcgtgcacaacgtggacgcattggcgctgcggcatctaacactaacgctgactggtactgtcgcatggcgcaggaaaatccgggcgtagatgttccggtttatggcgttccaatcaatacccgtgaagcccttggtgttctgcactttaaaggctttatcatcgacgatagcgtactttatagcggtgccagcctgaacgatgtttacctgcatcagcacgataaatatcgctacgaccgttatcatcttatccgtaaccgtaagatgtcagacattatgtttgaatgggttacacagaatattatgaatggccgcggcgttaatcgtctggatgatgttaatcggccaaaaagcccggaaatcaagaacgatattcgtctgttccgccaggagctgcgtgatgccgcttatcatttccagggcgatgccgacaacgatcagctttccgtaacgccgctagtggggctggggaaatcgagtctgttgaacaagaccattttccatcttatgccttgtgccgagcagaaactaaccatctgtacgccatacttcaacctgccagcaatccttgtgcgcaatattatccagttgctgcgcgaagggaaaaaggtcgaaattattgttggtgataaaaccgcgaacgacttctacattccggaagatgaacctttcaagataattggcgcattgccttatctctatgagatcaatctgcgtcgtttcctgagccgtttgcagtattacgtcaatactgaccagctagtggttcggttatggaaagatgacgacaacacctatcacctaaaagggatgtgggttgatgataagtggatgttgatcaccggtaataacctgaacccgcgcgcctggcgtctggatctggaaaacgccattttgatccacgatccacaactggagcttgcgccgcagcgagagaaagaactggagctgatccgcgagcataccaccatcgttaagcactatcgcgatctgcaaagtattgccgattatccggtgaaggttcgtaaactcatccgccgtttgcgccgtatccgcatcgaccgattaattagccgcatcctgtaatcacaaccccgtcctgtacggggtttgttttttggaggccacgttttgcgtattctttttgtctgttcgctattgttactttctggatgcagccatatggctaacgatagctggagcgggcaggataaagctcaacactttatcgcctcgnnnntgnnt

SEQ ID NO: 1374 - DNA, 3583 bp, Escherichia coli
  Strain O55:H7
  modified_base (379)..(379): a, c, g or t
  modified_base (426)..(426): a, c, g or t
  modified_base (444)..(444): a, c, g or t
  modified_base (448)..(448): a, c, g or t
  modified_base (3247)..(3250): a, c, g or t
gaaatgaatattcacagcatcaggggatgagccgggatcgcagtgccatgtttggtttgatgttctctgtcagtttgggggcgtcaaaagagttttgggatagccgccccgaagggagcggctggagctggaaggatttggcctgggatgtcgccggtgcaagcaccggctataccgtctggcaactgacccgtcactaaagacgcatccccttccctttgcgatgtagcatcaaagaaaccagaaacgccaccacggccatcaaggtcacataccagaagaaggctgtttccattcctattgatttcagcgacaacgctacgtactccgccgaaccaccaaatatagcattagcgaccgcatatgacagaccaacgcntaatgcgcgaacctgtgccgggaacatctcagccttcagtattccantgattgatgtataaaaantcantatcagcagggcacacatcaccagaccaaaagcggcataaggcgaggaaacgttttgcaatgctgagagaataggaacggtaaaaatggctgccagcgaaccgaaacataacattgaggtacggcgaccaatcttatccgacagcgcgccaatgagtggttgaataagcatgaatacaaacaatgcggcagtcataatgccactcgccacgttggcatgcattcccgcagtatttaccagatacttctgcatataagtggtgaaggtatagaaacaaagggagcccgcagcggtaaaaccgagaaccatgatgaatgcacggcgattgcgccataatcctttcagagatccagcttcttttaaagcgcgcgtttcttgttgcgaagtttcatctaactgacgacgtaaccacaacgccacaacagctaacacagctcctaacgcgaaaggaatacgccatccccactctctgagtgcagagtcttccatggtgtgttgtaaaaccacgacaaccagtagggctagcagttgtccgccgatcaacgtcacatactgaaatgatgcgtaaaaacctttgcgcccttcaacggcaacttcactcatataggtggcgctggtgccatattctccgccaacggataatccctgaaataaacgcgcgagaagcaataatgccggagcccacgtaccgattgtttcataaccaggcaaacaggcgattaccagtgagccgaaacacatcatacacaccgatagcagcatcgattttttgcgaccatgtttatcggctatgcggccaaatagccaaccgcctattgggcgcatcaggaatcccgcagcaaaaacacctgctgtttgtagtagttgagtcgtcgtgttcccggaagggaagaagatgtgggcaaagtagagtgaacagaacgagtagacatagaaatcgaaccactcgaccagattacctgaagaggcccccacaatcgcccaaatgcggcgacgagtatcactacttgtcagtttgctgtctgccgttacagtactttcagccatgccattatgtctcctgccgtaatccgatgcttttgtcggtcgcttttgtttatttcttttggcaaagaaaatgttatacatttgttacgtatcattatgcaaccttaaccatgaatttagttagcaggaaaatggttattgaggagcttaaggataaatttctggtaaggaggacacgtatggaagtaggcaagttggggaaaccgtatccgttgctgaatctggcatatgtgggagtataagacgcgcagcgtcgcatcaggcatttttttcaccaacgcaaaaaggccatcctgacggatggcctttcgcttaatttgatgcctggcagttccctactctcgcatggggagaccccacactaccatcggcgctacggcgtttcacttctgagttcggcatggggtcaggtgggaccaccgcgctacggccgctaggcaaattctgttttatcagaccgcttctgcgttctgatttaatctgtatcaggccgaaaatcttctctcatccgccaaaacaccttcggcgttgtaaggttaagcctcacggttcattagtaccggttagctcaacgcatcgctgcgcttacacacccggcctatcaacgtcgtcgtcttcaacgttccttcaggacccttaaagggtcagggagaactcatctcggggcaagtttcgtgcttagatgctttcagcacttatctcttccgcatttagctaccgggcagtgccattggcatgacaacccgaacaccagtgatgcgtccactccggtcctctcgtactaggagcagcccccctcagttctccagcgcccacggcagatagggaccgaactgtctcacgacgttctaaacccagctcgcgtaccactttaaatggcgaacagccatacccttgggacctacttcagccccaggatgtgatgagccgacatcgaggtgccaaacaccgccgtcgatatgaactcttgggcggtatcagcctgttatccccggagtaccttttatccgttgagcgatggcccttccattcagaaccaccggatcactatgacctgctttcgcacctgctcgcgccgtcacgctcgcagtcaagctggcttatgccattgcactaacctcctgatgtccgaccaggattagccaaccttcgtgctcctccgttactctttaggaggagaccgccccagtcaaactacccaccagacactgtccgcaacccggatcacgggtccacgttagaacatcaaacattaaagggtggtatttcaaggtcggctccatgcagactggcgtccacacttcaaagcctcccacctatcctacacatcaaggctcaatgttcagtgtcaagctatagtaaaggttcacggggtctttccgtcttgccgcgggtacactgcatcttcacagcgagttcaatttcactgagtctcgggtggagacagcctggccatcattacgccattcgtgcaggtcggaacttacccgacaaggaatttcgctaccttaggaccgttatagttacggccgccgtttaccggggcttcgatcaagagcttcgcttgcgctgaccccatcaattaaccttccggcaccgggcaggcgtcacaccgtatacgtccactttcgtgtttgcacagtgctgtgtttttaataaacagttgcagccagctggtatcttcgactgatttcagctccatccgcgagggacttcacctacatatcagcgtgccttctcccgaagttacgnnnnccattttgcctagttccttcacccgagttctctcaagcgccttggtattctctacctgaccacctgtgtcggtttggggtacgatttgatgttacctgatgcttagaggcttttcctggaagcagggcatttgttgcttcagcaccgtagtgcctcgtcatcacgcctcagccttgattttccggatttgcctggaaaaccagcctacacgcttaaaccgggacaaccgtcgcccggccaacatagccttctccgtccccccttcgcagtaacaccaagtacaggaatattaacctgtttcccatcgactacgcctttcggcctcgccttagg

SEQ ID NO: 1375 - DNA, 783 bp, Escherichia coli
  Strain O55:H7
  modified_base (116)..(116): a, c, g or t
  modified_base (125)..(125): a, c, g or t
  modified_base (698)..(698): a, c, g or t
actcaccctgccccgattaacgttggacaggaacccttggtcttccggcgagcgggcttttcacccgctttatcgttacttatgtcagcattcgcacttctgatacctccagcatncctcacagnacaccttcacaggcttacagaacgctcccctacccaacaacacacagtgtcgctgccgcagcttcggtgcatggtttagccccgttacatcttccgcgcaggccgactcgaccagtgagctattacgctttctttaaatgatggctgcttctaagccaacatcctggctgtctgggccttcccacatcgtttcccacttaaccatgactttgggaccttagctggcggtctgggttgtttccctcttcacgacggacgttagcacccgccgtgtgtctcccgtgataacattctccggtattcgcagtttgcatcgggttggtaagtcgggatgacccccttgccgaaacagtgctctacccccggagatgaattcacgaggcgctacctaaatagctttcggggagaaccagctatctcccggtttgattggcctttcacccccagccacaagtcatccgctaatttttcaacattagtcggttcggtcctccagttagtgttacccaaccttcaacctgcccatggctagatcaccgggtttcgggtctataccctgcaacttaacgcccngttaagactcggtttcccttcggctcccctattcggttaaccttgctacagaatataagtcgctgacccattatacaaaaggtac

SEQ ID NO: 1376 - DNA, 218 bp, Escherichia coli
  Strain O55:H7
  modified_base (6)..(6): a, c, g or t
  modified_base (173)..(173): a, c, g or t
  modified_base (214)..(215): a, c, g or t
tgtacntacacggtttcaggttctttttcactcccctcgccggggttcttttcgcctttccctcacggtactggttcactatcggtcagtcaggagtatttagccttggaggatggtccccccatattcagacaggataccacgtgtcccgccctactcatcgagctcacagnatgtgcatttttgtgtacggggctgtcaccctgtatcgcgnncct

SEQ ID NO: 1377 - DNA, 153 bp, Escherichia coli
  Strain O55:H7
ccactaacacacacactgattcaggctctgggctcctccccgttcgctcgccgctactgggggaatctcggttgatttcttttcctcggggtacttagatgtttcagttcccccggttcgcctcattaacctatggattcagttaatgatagt

SEQ ID NO: 1378 - DNA, 63 bp, Escherichia coli
  Strain O55:H7
ccattcggaaatcgccggttataacggttcatatcaccttaccgacgcttatcgcagattagc

SEQ ID NO: 1379 - DNA, 68 bp, Escherichia coli
  Strain O55:H7
  modified_base (4)..(4): a, c, g or t
  modified_base (13)..(13): a, c, g or t
cctncatcgcctntgactgccagggcatccaccgtgtacgcttagtcgcttaacctcacaacccgaag

SEQ ID NO: 1380 - DNA, 75 bp, Escherichia coli
  Strain O55:H7
  modified_base (2)..(3): a, c, g or t
  modified_base (27)..(28): a, c, g or t
  modified_base (51)..(51): a, c, g or t
cnntcgattcatcatcgtgttgcgaanntttgagagactcacgaacaactntcgttgttcagtgtttcaattttc

SEQ ID NO: 1381 - DNA, 785 bp, Escherichia coli
  Strain O55:H7
  modified_base (99)..(100): a, c, g or t
  modified_base (126)..(127): a, c, g or t
  modified_base (239)..(240): a, c, g or t
  modified_base (371)..(371): a, c, g or t
  modified_base (479)..(479): a, c, g or t
  modified_base (769)..(770): a, c, g or t
  modified_base (772)..(775): a, c, g or t
  modified_base (782)..(784): a, c, g or t
agatttttaaagagcaaatatctcaaacatcacccgaagatgagttttgagatattaaggtcggcgactttcactcacaaaccagcaagtggcgtcccnnaggggattcgaacccctgttaccgcnntgaaagggcggtgtcctgggcctctagacgaaggggacgtatcagtctgcttcgcaagacgccttgcttttcactttctatcagacaatctgtgtgagcactgcaaagtacnnttctttaaggtaaggaggtgatccaaccgcaggttcccctacggttaccttgttacgacttcaccccagtcatgaatcacaaagtggtaagcgccctcccgaaggttaagctacctacttcttttgcaacncactcccatggtgtgacgggcggtgtgtacaaggcccgggaacgtattcaccgtggcattctgatccacgattactagcgattccgacttcatggagtcgagttgcanactccaatccggactacgacgcactttatgaggtccgcttgctctcgcgaggtcgcttctctttgtatgcgccattgtagcacgtgtgtagccctggtcgtaagggccatgatgacttgacgtcatccccaccttcctccagtttatcactggcagtctcctttgagttcccggccggaccgctggcaacaaaggataagggttgcgctcgttgcgggacttaacccaacatttcacaacacgagctgacgacagccatgcagcacctgtctcacggttcccgaaggcannannnnatctctnnna

SEQ ID NO: 1382 - DNA, 134 bp, Escherichia coli
  Strain O55:H7
tggatgtcaagaccaggtaaggttcttcgcgttgcatcgaattaaaccacatgctccaccgcttgtgcgggcccccgtcaattcatttgagttttaaccttgcggccgtactccccaggcggtcgacttaacgc

SEQ ID NO: 1383 - DNA, 84 bp, Escherichia coli
  Strain O55:H7
cacgcctcaagggcacaacctccaagtcgacatcgtttacggcgtggactaccagggtatctaatcctgtttgctccccacgct

SEQ ID NO: 1384 - DNA, 169 bp, Escherichia coli
  Strain O55:H7
  modified_base (64)..(67): a, c, g or t
cacctgagcgtcagtcttcgtccagggggccgccttcgccaccggtattcctccagatctctannnnatttcaccgctacacttggaattctacccccctctacgagactcaagcttgccagtatcagatgcagttcccaggttgagcccggggatttcacatctgact

SEQ ID NO: 1385 - DNA, 609 bp, Escherichia coli
  Strain O55:H7
  modified_base (129)..(131): a, c, g or t
  modified_base (194)..(194): a, c, g or t
  modified_base (501)..(501): a, c, g or t
aaaccgcctgcgtgcgctttacgcccagtaattccgattaacgcttgcaccctccgtattaccgcggctgctggcacggagttagccggtgcttcttctgcgggtaacgtcaatgagcaaaggtattannntactcccttcctccccgctgaaagtactttacaaccccgaaggccttcttcatacacgcgggnatggctgcatcaggcttgcgcccattgtgcaatattccccactgctgcctcccgtaggagtctggaccgtgtctcagttccagtgtggctggtcatcctctcagaccagctagggatcgtcgcctaggtgagccgttaccccacctactagctaatcccatctgggcacatccgatggcaagaggcccaaaggtccccctctttggtcttgcgacgttatgcggtattagctaccgtttccagtagttatccctctccatcaggcagtttcccagacattactcacccgtccgccactcgtcagcanagaagcaagcttcttcctgttaccgttcgacttgcatgtgttaggcctgccgccagcgttcaatctgagccatgatcaaactcttcaatttaaaagtttgatgctcaa

SEQ ID NO: 1386 - DNA, 14001 bp, Escherichia coli
  Strain O55:H7
  modified_base (848)..(848): a, c, g or t
  modified_base (4489)..(4489): a, c, g or t
  modified_base (4954)..(4954): a, c, g or t
  modified_base (5369)..(5372): a, c, g or t
  modified_base (6536)..(6537): a, c, g or t
  modified_base (6541)..(6544): a, c, g or t
  modified_base (6610)..(6613): a, c, g or t
  modified_base (6646)..(6646): a, c, g or t
  modified_base (6927)..(6927): a, c, g or t
  modified_base (6973)..(6976): a, c, g or t
  modified_base (6988)..(6988): a, c, g or t
  modified_base (7021)..(7021): a, c, g or t
  modified_base (7285)..(7285): a, c, g or t
  modified_base (8054)..(8054): a, c, g or t
  modified_base (12318)..(12318): a, c, g or t
taaacttcgtaatgaattacgcgttcactcttgagacttggtattcatttttcgtcttgcgacgttaagaatccgtatcttcgagtgcccacacagattgtctgataaattgttaaagagcagtgccgcttcgctttttctcagcggcgcggggtgtgcataatacgccttcccgctacagagtcaagcatttatttttgctttctctgccggaattctcaggagaaccccgctgacccggcggcgtgtttgccgttgttccgtgtcagtggtggcgcattatagggagttattccggcctgacaagcgaaaaatataaaaactttatcgttcgctcatttttcaggcaaaacatcttaaatatagtcttttccgtctaacttatagacaaaaacgagccccgaagggctcgttttatcattactggacggcgacaatccggtcttcattaacttccaggcgaataactttacccggaaccaattcaccagacagtatttgctgtgccaacgggttttcgatctgctgctggatagcacgtttcaaaggacgtgcaccatagactggatcgtaaccgttctcgctcagcagtttcagcgcctcgtcagaaatgtggatttcataaccacgttcttccagacgtttgtacagacgtttcaactgaatctgcgcaatcgaggcaatgtgctgttcgcccagcggatggaagaccaccacttcatcgatacggttaatgaactccggacggaagttatggcttaccacaccgagcaccagctctttcatgtgcgcataatccagttcaccgaagcgttcctgaatcagatcggaaccgaggttagaggtcntaatgacgaccgtattacggaagtcgaccgttctcccttgcccgtcagtcagacgcccatcatccagtacctgcaacagaatgttgaagacatccggatgcgctttttccacttcatccagcaggatgacggaatacggacgacgacgcaccgcttcggtcaggtagccaccttcttcataaccgacatatcccggaggcgcaccaaccagacgagacaccgagtgtttctccataaactcggacatatcgatacggaccatcgcctcgtcgctatcaaacataaagttcgccagcgccttacaaagctctgttttccccacaccagttgggccgaggaacaggaatgaaccaatcgggcgatttggatccgccagccccgcacggctacgacgaatagcgttagataccgcatcaaccgcttcgttctgaccaattacgcgatggtgcagttcttgctccatacgcagcagtttttcgcgctcgctttccatcatgcgagaaaccggaatccccgtccaacgcgccagcacttcagcaatttcggcgtcggtcactttattacgcaacagacgcatagttttgccttcgagctgcgttgcggcttccagttgcttttccagttccgggattttgccgtattgcagttcagacatccgcgccaggtcacccacacggcgagcctgttcaatagcgattttcgcctgttccagttccgctttaatggtctgcgtaccagaaagcgatgccttctctgctttccactcttcttctaactcggagtactgacgttctttgtcgctcagttcttcgttgagcatatccagacgttttttactggcttcatcagactctttcattaacgcctgttgttccagtttgagctggatgatacggcgatcgagtcggtcgagttcttctggttttgagtcaatctgcatacgaatgctggatgctgcttcatcgatcaggtcgatggctttatccggcagctgacggtcagcaatgtagcgatgagacaacgtcgccgctgcaacaattgccgggtcagtaatttgcacatggtggtgcaattcgtaacgttctttcaggccacgcagaatcgcaatggtatcttcaacagaaggctcggcaacaaacactttctggaaacgacgttccagcgcagcatctttttcgatgtactggcgatattcgtcaagcgtcgtggcacctacgcagtgcaattcaccacgcgccagcgccggtttcagcatgtttccggcgtccattgcgccatcggctttacccgcgccgaccatggtatgtaattcgtcgataaacaggatgacgttgccttcctgtttggcaagatcgttaagcacgccttttaaacgttcttcaaactcaccgcgatatttcgccccagccaccagcgcgcccatatccagcgccagtacccggcggcctttcaacccttccggcacttcgccgttgataatacgctgcgccagaccttcaacgatggcagttttaccgacgccgggttcaccaatcagtaccgggttatttttagtacgacgttgcagcacctgaatggtacggcgaatttcttcatcacgaccaatcaccggatcgagtttgccctgttcggctcgttcggtaaggtcgatggtatattttttcaaagcctgacgttggtcttcagcaccttgatcgttcacgctttcacctccacgcatttgttcaatcgcttgagtaatgttggcggtggtcgcccctgctgctttcaggatgtcggccagcgtgccgcgagactcaagtgccgccagaacgaacagttctgacgagataaagttatcaccacgtttttgcgccagcttgtcgcaaagattaagaacgcgcaccagatcctgtgatggctggacatcaccaccagtaccttcaacctgcggtaaacgatttaatgcctgattgatatctgtgcgcaactggccagcatttatgccagcggatgttaataaaggactaaccgaacccccttcctgattcagcagggcgctcattaaatgaagtggttcgataaattggttgtcgtgcccaagtgcaagtgattgggcatcggcaagagcaagctggaatttattagtaagacgatccagacgcataactcctcccataacggatcaaagttgctactggagattaaatgaggtcatccctcaattattcaaggttattgaccagattaatgtgaaaagaaaatcacgcgtaccggatcgtcttgattctttaggttatatcagccaaatgaaacttgccatacgaccggtggtcttgtcgcgacgataagagaagaaagtctcattttccgtatatgtacaacggtcgccgccgaaaatttgctcaacacccacgttcgccagacgctgccgggcaagctgataaatgtccgccagatacttatcaccatgctgaatgaaagctgtactcgcttcggcgtctactgccataaacgcctcgcgaacctccgcccccacttcaaacgcgcgtgggccaattgccggccctaaccaggcgagaatattttctggattatcagcaaaacaggaaactgtctcttccagcacgcctgcgcacagtccacgccagccagcatgagcggcggcgacttccgttcccgctcgattgcaaaacagcacagggaggcagtcggcagtcatcactgcgcaaaccctgccgggcgtattgctataagaggcatctgctcgttttgaggcataaggttcgccagtaagattaagcacatctttgccgtgtacctgctcaagccagaccggtttagaaggcaaattgcccgcagcaaaaagtcgcttgcgattctcctcaacgtgatccgggttatcgccacaatgggcaccgaggttgagcgagtcatacgggggcaagctcacgccgccgatacgagtagagctacaggccgcaacaccttttggcagcggccactgcgggacaatcagcttactcataaccagtccacttcatctttatgctcttcgaaatcggcgcgcatcacctcaatcagctccaccatatcttgtggaataggcgcatgccattccatttcgataccggagatcgggtgataaagacgcagcatggttgcatgaagcgcctggcggtcaaatttacgcagcgtggagataaacgcttccgaagcaccttttggcgggcgcggacggccaccataaaccggatcgcccaccagcggatgagtgatatgggccatatgcacgcggatctggtgcgtacgtccagtttccagacgcaaccgcagacgcgtgtgcacacggaagtgttccatgatgcgatagtgagtcaccgccggtttgcccatcggatgcaccgccatgtgagtacgtttggtcgggtggcggctgattggttcatctactgtaccgccagcggtcatatgaccaattgccaccgcttcatactcacgagtaatttcacgcctttgcaaagattcgactaaacgcgtctgagccggaacggtttttgccacaaccatcaggccagtggtgtctttatccagacgatggacgatgcctgcacgcggtacatcagcaatgggcggatagtaatgaagtaacgcattcagtnccgtgccatccgggttacccgcgccaggatgtaccaccagatcgcgcggtttattaatgacgatgatatcttcatcttcatagacgatatccagcgggatatcctgcggttcaaaacgcgcttcttcttcaatctcagcgttgatggcaacctgctcgccacccaatactttttctttcggcttatcacaaagtttgccgttaaccagcacgcgctggtcgaggatccattcttttattcgcgaacgtgaataatccgggaacatttcggccaaagcctgatctaagcgttgaccgagttggttttcggacaccgttgcagtgagctgtactcgttgtgccatatatactgcttcttcgtttatcgttggggttttacggctttgccgtttaatatagtgtgctattgtagctggtcttaaccgggagcaggaacagagaatctcccgtattacattttgagganagtcaaaacgtcatgacgcgcatgaaatatctggtggcagccgccacactaagcctgtttttggcgggttgctcggggtcaaaggaagaagtacctgataatccgccaaatgaaatttacgcgactgcacaacaaaagctgcaggacggtaactggagacaggcaataacgcaactggaagcgttagataatcgctatccgtttggtccgtattcgcagcaggtgcagctggatctcatctacgcctactataaaaacgccgatttgccgttagcgcaggctgccatcgatcgttttattcgccttaacccgacccatccgaatatcgattatgtcatgtacatgcgtggcctgaccaatatggcgctggatgacagtgcgctgcaagggttctttggcgttgaccgtagcgatnnnnatcctcaacatgcacgagctgcgtttagtgacttttccaaactggtgcgcggctatccaaacagtcagtacaccaccgatgccaccaaacgtctggtattcctgaaagatcgtctggcgaaatatgaatactccgtggccgagtactatacagaacgtggcgcatgggttgccgtcgttaaccgcgtagaaggcatgttgcgcgactacccggatacccaggctacgcgtgatgcgctgccgctgatggaaaatgcataccgtcagatgcagatgaatgcgcaagctgaaaaagtagcgaaaatcatcgccgcaaacagcagcaatacataacagaaacctgaaacacaaaacggcagcccttgagctgccgtttttttattctgtcagttgtgaaactgaagcgatttagtcactatcgatctcatcaaatatggctcgctttgagatattcctcaagtaaaaaaacacctcttcctgcgatttctcacaaaaaagattcgttgacaaaaagtgacaaaattatgagatttccatcacacattttgacatcaggaacggtatgctgaattcaccaagacgggaagacaagaggtaaaatttatgacaatgaacattaccagcaaacaaatggaaattactccggccatccgccaacatgtcgcagaccgtctcgccaaactggaaaaatggcaaacacatctgattaatccacatatcattctgtccaaagagccacaagggtttgttgctgacgccacaatcaatacacctaacggcgttctggttgccagtggtaaacatgaagatatgtacaccgcaattaacgaattgatcaacaagctggaacggcagctcaataaactgcagcacaaaggcgaagcacgtcgtgccgcaacatcggtgaaagacgccaacttcgtcgaagaagttgaagaagagtagtcctttatattgagtgtatcgccaacgcgccttcgggcgcgttttttgttgacagcgtgaaaacagtacgggtactgtactaaagtcacttaaggaaacaaacatgaaacacacaccgtttttcttcgcattcttttttaccttcccctgaatgggaggcgtttcgtcgtgtgaaacagaatgcgaagaagaacaataaggcctcccaaatcggggggcnntttnnnntgataacaaaaaggcaacactatgacatcggaaaacccgttactggcgctgcgagagaaaatcagnnnnctggatgaaaaattattagcattactggcagancggcgcgaactggccgtcgaggtgggaaaagccaaactgctctcgcatcgcccggtacgtgatattgatcgtgaacgcgatttactggaaagattaattacgctcggtaaagcgcaccatctggacgcccattacattactcgcctgttccagctcatcattgaagattccgtattaactcagcaggctttgctccaacaacatctcaataaaattaatccgcactcagcacgcatcgcttttctcggccccaaaggttcttattcccatcttgcggcgcnccagtatgctgcccgtcactttgagcaattcattgaaagtggctgnnnnaaatttgccganatttttaatcaggtggaaaccggccaggccgantatgccgtcgtaccgattgaaaataccagctccggtgccataaatgacgtttacgatctgctgcaacataccagcttgtcgattgttggcgagatgacgttaactatcgaccattgtttgttagtctccggcacgactgatttatccaccatcaatacggtctacagccatccgcagccattccagcaatgcagcaaattccttaatcgttatccgcactggaagattgaatataccgaaagtacgtctgcggcaatggaaaangttgcacaggcaaaatcaccgcatgttgctgcgttaggaagcgaagctggcggcactttgtacggtttgcaggtactggagcggattgaagcgaatcagcgacaaaacttcacccgatttgtggtgttggcgcgtaaagccattaacgtgtctgatcaggttccggcgaaaacgacgttgttaatggcgaccgggcaacaagccggtgcgctggttgaagcgttgctggtactgcgcaaccacaatctgattatgacccgtctggaatcacgcccgattcacggtaatccatgggaagagatgttttatctggatattcaggccaatcttgaatcagcggaaatgcaaaaagcattgaaagagttaggggaaatcacccgttcaatgaaggtattgggctgttaccctagtgagaacgtagtgcctgttgatccaacctgatgaaaaggtgccggatgatgtgaatcatccggcactggattattactggcgattgtcattcgcctgacgcaataacacgcggctttcactctgaaaacgctgtgcgtaatcgccgaaccagtgctccaccttgcggaaactgtcaataaacgcctgcttatcgccctgctccagcaactcaatcgcctcgccgaaacgcttatagtaacgtttgattaacgccagattacgctctgacgacataataatgtcggcataaagctgcggatcctgagcgaacagtcgcccgaccatcgccagctcaaggcggtaaatcggcgaagagagngccagaagttgctcaagctgaacattttcttctgccaggtgcagcccgtaagcaaaagtagcaaagtggcgcagtgcctgaataaacgccatattctgatcgtgctcgacggcgctaatacgatgcaaccgagcgccccagacctgaatttgctccagaaaccattggtatgcttccggtttacgtccatcacaccagaccacaacttgctttgccaggctaccgctgtccggaccgaacattgggtgtaaccccagtaccgggccatcgtgcgccgccagcatggcctgtaatggtccatttttcactgatgccagatcaaccagaatacaatctttcggtaaaggcggtaatttgccaataacttgctcagtaacgtggattggcacactaacaatcaccattccggcatcggcaacaatatcagccgctcgatcccagtcatgttgctccagaatccgcacctgataacccgagagtgtcagcatcttctcgaacagacgtcccatctgaccgccgccgccaacgataactaccgggcgtaacgcaggacaaagcgttttaaatcctttgtcgttttcactggagtaagattcacgcatcacccgacgcaaaacatcctcaatcagatctggcggtacacccagagcttccgcctctgcacgacgcgaggccaacatagatgcctctcgctccggaacataaataggcagtccaaagcggcttttcacctcgcccacttcagcaaccagttccagacgcttcgctaataaattcagcagcgctttatcgacttcatcaatttgatcgcgtaatgcggtcaattcagcaaccataataaacctcttaagccacgcgagccgtcagctgcccgttcagatcctgatgaatttcacgcagcaaggcatcggtcatttcccagctaatgcaggcatcggttacggatacaccgtatttcatttcactgcgcggttgctcggaagactgattgccctcgtggatattactttcgatcatcagaccaataattgagcgattgccatctttgatttgagcaaccacggattctgccaccgcaggctgacggcgataatctttattggaattaccgtggctgcaatctaccatcagagacgggcgcagtcccgcctgttccatctctttttcacattgcgcaacatccgcagggctatagttcggcgctttaccaccgcgcaggatgacatgcccgtccggattcccctgagtttgtagcaacgcaacctgccctgcctggttaatgccaacaaaacggtgcggctgggcggcggcgcgcatagcgttaattgctgttgccagactgccgtcggtgccgtttttaaagccaaccggcatggaaagcccggaggccatttcacggtgagtttgcgattccgttgtacgagcaccaattgctgaccagctaaacagatcgcccaggtattgcgggctattcggatctaacgcttccgtcgccagtggcagtcccatattcaccagctcaagcagcaatttacgcgcgatctgcagcccggcttctacatcaaaagagccatccatatggggatcgttaattaaccctttccagccgacagtggtacggggtttttcaaaatagacgcgcattaccagatagaggctatcgctgacctctgcggcaagggctttaaatcgacgagcatattccagagcagtttccggatcatgaatggaacaagggccacatactaccagcagacgaggatcgcgcccggcgataatatctgaaatggttttacgcgagtcagcaatctgggcttcttgttgcaggcttaatggaaaagcggccttcagttgtgccggagtcattaaaacctgttcgtcggtaatatgtacgttattcagcgcgtctttttgcatgatggcgatcctgtttatgctcgtttgcgatagttgatcctcagcgaggatgacgtaacgataacacataaagtaaagttttcaatccatatttcgtacatttttctttacataagcaatttattcgcgctttcaacccttgattctgtatagataaatttacaccacctttgaaaacaatccgctatgctttgaaaaaggagaaagaaatgatgaaaaagtttatcgcccccttgttggctttactggttagcggatgccagattgatccttatactcacgcgccaaccttgaccagcaccgactggtatgatgttggtatggaagatgcgatatcgggcagcgccataaaagatgacgatgcatttagcgattcacaggcggatcgcggtctataccttaaaggatatgccgaaggacaaaagaaaacttgccagaccgattttacttatgcccgaggactttccggtaaaagctttcctgccagctgcaacaatgttgaaaatgccagccaactgcatgaagtatggcaaaaaggggctgatgaaaatgccagcgcaatacgattaaattaattaaaaccccacaaataaattaaacataagattttactcattatgttttatttctcacaatgatgacgaccgcatgaaataatgatattttaatgagcattctgaaaaaatatcgatgcatttcgagcgaagatggtggggatccctgaatgcgtttttctcaccgactgttcttactgctgattctcctgctgacgggagcaccaatactcgctcaggagccttctgacgttgcgaaaaacgtgcgtatgatggtttccggtattgtcagttacacccgctggcctgcgctatcagggccaccaaagttatgtatcttttcatcttcacgttttagtaccgccctacaagagaatgccgcaacatctttgccttatctgcctgtcatcattcacactcaacaagaggcgatgatttcaggctgcaatggtttttattttggcaacgagtcaccgacattccagatggaattaaccgaacaatatccgtcaaaggcgttattattaattgccgaacaaaataccgagtgcattattggtagcgccttttgtctgatcatccacaataatgacgtcagatttgccgtaaacctggatgccttatcgcgtagcggtgtaaaggtcaacccggatgtcttaatgctcgcacggaagaaaaatgatggataacgataattctcttaataagcgccccacgtttaaaagagcattacgcaacatcagtatgaccagcatatttatcactatgatgctgatctggttgctgctttccgtgacctcggtgctgaccctgaaacagtacgcgcaaaaaaacctggcactgacagcagcaacaatgacttacagtctggaagcagctgtcgtttttgccgatggccctgcagcaactgaaacactggcagcgctgggccagcaagggcaattttcaactgcagaagtacgtgataagcagcaaaatattctggcatcctggcattacacccgtaaggatccaggcgatactttcagcaatttcataagccactggctcttccctgcccccatcattcagccgattcgtcacaatggtgaaaccattggcgaagtacgcttaaccgctcgcgacagttcaatcagccattttatctggttttcgctcgccgtactgaccggttgtattctgctggcatcaggaatcgcaattaccctcacccgccatttgcacaatggcctggtggaagcactgaaaaatatcaccgatgtcgtacatgatgtgcgttccaaccgcaatttttcccgacgagtttcggaagaacgtatcgctgagtttcaccgcttcgctctcgacttcaacagtctgctggatgaaatggaagagtggcagcttcgtttacaggccaaaaatgcgcagcttctacgtaccgcgctacatgacccattaaccgggctggctaaccgcgcagcgtttcgtagcggcatcaatacgttgatgaacaattccgctgcccgaaaaacgtcggcgttactatttcttgatggcgataatttcaaatatatcaatgatacctggggtcatgcgacgggcgatagagtcttgattgaaatcgcaaaacggttagctgaatttggcgggctgcgacataaagcataccgcctgggcggcgatgaattcgctatggtgctctatggtgtacagtcggaatctgaagtgcagcagatatgctcagcactgacacaaatctttaatctcccgtttgatcttcataatggccatcagaccaccatgacattaancattggttacgcaatgaccattgcgcacgcttctgcggaaaaattacaagagctggccgatcacaatatgtatcaggccaaacaccagcgtgccgaaaagctggtgagataacaaggatatatcgatatgataaagcacctggtagcacccctgattttcacctcactaatactgactggctgccagtcccctcagggaaagtttactcctgagcaagtcgccgctatgcaatcttatggatttactgaatccgccggcgactggtcgctgggcttatcagatgccattctgttcgcaaaaaatgactacaaattgctcccggaaagccagcaacagatccaaaccatggcagccaaattggcctcgacagggctaacacatgcccgtatggatggacacaccgataactatggtgaagacagttacaacgaaggcttatcattgaaacgggcgaatgtcgtggccgatgcatgggctatgggtggacaaattccacgcagcaatctcaccacacagggtttaggaaaaaaatatcccatagccagtaacaagaccgcccagggccgcgccgagaaccgccgcgtcgcagtggtgattactaccccttaaaacacgagcaaacagataaaaaaagggccagccaattggccagcccttcttaacaggatgtcgcttaagcgaaatcttagttaagacgctctttgatacgagcagccttaccagtacgctcacgcaggtagtacagtttagctttacgaacagcaccacgacgtttgacagaaatgctgtcaactaccggagagtgagtctggaagacacgctcaacgccttcgccgttggaaattttacgaacagtgaatgcagagtgcagaccgcggttacgaatagcgataaccacgccctcgaatgcctgcagacgttttttggaaccttcaacaacccatactttcacttccacggtatcccccggacggaaggaaggtacgtcctgcttcatctgctcttgttcaagttgcttaataatgttgctcataatttaatctcttatcctgggtaaactgatatctcgggggcttacgccatcccatcatgtttatgttgctgttgtgcgtgttccgttttgaactccgccagcaaccttgcttgctcttcagtcagagccaggttttccagaagttcaggtcttctaagccaggtacggcccagcgactgtttcaaacgccagcgacgtatctcggcatggttgcccgacagtaacactggcggaacttccatcccttctaacacctcaggccgcgtatagtgcgggcaatccagcaatccttcagcaaaggaatcttccgttgccgaggcttcatgtcccagtactcccggaataaaccgggaaacggagtcaatcagcgtcattgctggtaactcaccaccactgagaacgtaatcgccgattgaccattcttcgtcaatttcggtttggatcacgcgctcatctataccttcgtagcgaccgcacaccagaatcaatttttgattcgttgccagttcgctgacgcccgcttgatcaagcttgcgtccctgtggtgaaagataaatcacctttgcgccttcacccgccgcggcttttgctgcatgaatggcgtcccgcaagggttgcaccatcattaacatccccggtccgccgccgt

SEQ ID NO: 1387 - DNA, 9484 bp, Escherichia coli
  Strain O55:H7
  modified_base (4312)..(4312): a, c, g or t
  modified_base (7719)..(7722): a, c, g or t
  modified_base (8091)..(8094): a, c, g or t
cgatcgtccacggtacggtgccggtcatgcgtgaaatcgcgaggactccagctctggatgctcagcaggccatttttaactgcccggccagttaccccgtaatcggtaattgcgcggaacatttcaggaaacaggctaattatgccaatccacatagcgccgtcttttaccgtttatccggtggtttaaaaaccaggatcccaatctacttcgattgaacgagtagtgagatcgactttcttgataacctgcccatcgaggaacggtacgagacgttccttgataccaaacgcatctttcaggtttgccttaatgacgagaacgtcattggatccggtttccatcatatcgacgactttaccgagatcgtagccttcagtggttactacctggcagcccatcaggtctttccagtagtagtcaccctcttcaagctgaggcagctgcgatgaatccacgacaatttcacaattcgtcagcaggttcgccgcatcacgatcgtcaacgcctttcagcttgatgatcatgtcctgattgtggtgcttccagctttccagctggacttgctgccactgacccgccttctggataaaccagggctgatagtcaaaaatgctttcggcgtcttcggtggaagaaaacactctgagccacccacgaataccgtaagacgaacccatttttcccaaaacgatgggatcaacaggtgcttgcgcggtgagttgtttgctcatcatgaccaccgtgacagattaagctgctttgtttacttctttgatcagcgcagcaacgcgatcagaaatagttgcgccctggccaacccagtgagcgatgcgatccagatccaggcgagtgccttcttctttttcgctagcgattgggttgaagaaaccaacgcgctcgatgaagcgaccgttgcgtgcattacggctgtcagcgacaacaacctggtagaacggacgctttttagcgccgtgacgtgctaaacgaatagttaccataacatcctcttgtgtgaataaaacaaccggaccccatcgaggaacggagtccggtgtcatattaaaagcccgaaaattttactgatttctggagaaaatgcaatcagcagttaataactctgtcgcataaggtcatttagcgaccaggaaatcccggcggcatcatccccttcatgcttctcatcatcttcgccattccgcccttcttcattttcttcatcatgcgctgcatgtcgtcgaactgtttcagaagacggttaacgtcctgcacctgcataccgcaaccggcagcaatacggcgtttacgcgaacctttgatgatttctggcttagcgcgctctttcatcgtcatcgagttgatgatggcttccatacgcaccagcactttatcgtccatctgtgacttgacgttatccgggatctgccccatgcccggcagtttgcccatcaggctggccatgccgcccatatttttcatctggcgcagttgctcaaggaagtcgttgagatcgaagccgtcaccttttttcagcttgctggctaatttctctgcctgcgcgcggtcaactttgctttcgatatcttcgatcagcgacagtacgtcgcccatgccgagaatacgcgacgcgatgcggtccggatggaacggctccagcgcctcagttttctcgccaacaccgaggaacttgatcggtttgccagtgatgtgacgaatagagagcgccgcaccgccgcgggcatcgccgtccactttggtcaacactacgccggtaagcggtaacgcttcattgaatgcttttgccgtattggccgcatcctgaccggtcatggcgtcaaccacaaacagggtttcaaccgggttaatcgacgcatggacttgtttgatctcgtccatcatcgcttcgtcaacgtgcagacgaccagcggtatccaccagcagcacgtcgtagaatttcagtttggcttctttcagcgccgcgttaacaatatcaaccggcttctgaccaacatcagaagggaagaaatcaacgcccacctgctctgccagcgtctcaagctgtttgattgccgccgggcgatagacgtcagcagaaaccaccagcactttcttcttgtgcttctcgcgcaggaacttaccgagtttaccaacgctggttgttttaccggcaccttgcaggcctgccatcagcacgaccgcaggcggttgcgcagccagattcagggtctggttctcttcgcccatcgccgcaaccagttcgttacggacgattttgacgaactcctgccccggcgtcaggctcttattaacttcatgaccaaccgctttctcttttacgcgattgataaactcacgcactaccggcagagcgacgtccgcctccagcagcgccatgcgcacttcgcgcagcgtatcttttacgttgtcttcagtgaggcgtccacggccactgatattgcgcagcgtgcgcgacaaacgatcggttaaattatcaaacattgtctctcgcctgaggtggaaacggttggccgcaatcgcgacacatcatcagtattttgccgcagtataacatgaaggcgtctttgttgttatgcaacggttggagcagcgttcacctgacgctatactgcttctctttcttattgctcaaactgtcgacatcactatgcccgtttttgctctgctcgcgcttgtcgcctactccgtcagtcttgcgctgattgttcccggtctgctgcaaaaaaacggcggctggcggcgcatggctattatttctgcggtcattgcgctggtctgccacgcaatcgctctggaagcccgcatcctgcccgacggtgatagcggacaaaacctcagcctgctgaacgttggttcattggtcagtttgatgatctgtacggtaatgaccattgtggcttctcgcaatcgtggctggttgctgctacccattgtctatgcctttgcgcttatcaacctggcgctggcaaccttcatgcccaatgaatacatcacccatctggaagctacgcctgggatgctggtgcacattggcttatcgctcttttcctatgccacgctaattatcgccgccctgtacgcgctgcaactggcgtggattgattaccaactgaagaacaagaagctggcgtttaaccaggaaatgccgccattgatgagtatcgagcgtaaaatgttccacatcacgcagattggcgtggtgctgctaacgctcacgctttgcactggcctgttctacatgcacaacttatttagcatggaaaatatcgacaaggctgtgctctctatcgtggcgtggtttgtctatattgtgctgctatggggacattatcatgaaggatggcgtggacgtcgcgtcgtctggtttaacgttgcgggtgcagtcattctgacactggcctacttcggcagccgaattgtccagcagttaatcagctaaacccagaaaaggagtttccccctggaacacatttctactactacgttgatcattattctgatcatcatggtggtcatttcagcctatttttccgggtccgaaaccggaatgatgaccctcaaccgctatcgtctgcgacatatggcgaaacagggtaatcgctcggccaaacgcgtcgaaaaattgctgcgtaagccagaccgcctgataagcctggtgttaatcggcaataacctggtcaatattcttgcctccgcgctcggcactattgttgggatgcgtttgtacggcgatgcgggcgtggcaattgcgactggtgtgctgacttttgtcgtactggtttttgctgaggtattgccgaaaaccattgccgcgctgtacccggaaaaagtcgcttatccgagtagttttctgctggctcccctgcaaattttgatgatgccgctggtctggttgctgaatgctatcacccgtatgctgatgcgcatgatgggtatcaaaaccgatatcgtggttagcggctctttgagcaaagaagagttgcgcactatcgtgcacgaatcgcgctcacaaatttcccgtcgcaatcaggatatgctgctgtcggtgctcgatctggaaaaaatgaccgttgatgacatcatggtgccgcgtagtgaaattatcggtattgatatcaacgatgactggaaatctattctgcgccaactctcccactcacctcacgggcgcatcgtgctctaccgtgattcgctggacgacgccatcagtatgctgcgagtacgtgaagcttggcggttgatgtcggagaaaaaagagttcaccaaagaaaccatgctgcgcgccgcggacganatctattttgtgccggaaggtacgccgctcagcacgcagttggtgaagtttcagcgcaacaaaaagaaagtcggcctggtcgtcaacgagtatggagacattcaggggctggtgacggttgaagatattctggaagagattgtcggcgatttcactacgtcgatgtcgccaacacttgccgaagaagtcacgccgcaaaacgacggttcggtgattattgatggcactgccaacgtgcgggaaatcaacaaagcctttaactggcatctaccggaagatgatgcccgcacggttaatggcgtcattcttgaggcactggaagagatccctgtcgtaggcacccgcgtgcgtattggcgagtacgatatcgatattctcgacgtacaggacaatatgattaagcaggtaaaagtttttcctgtgaaaccgctgcgcgagagtgtggcggagtaacgaaaacggcccggcattcgcatgcagggccgtgaattattacgaaaacagaaattacgcttttgctttcgctacagttaccatcgccgcacgaatcgtacgaccattcagcgtataacccttctgcataatgcccagtacgttacctggcgcaacgtcatcagattccaccattgcgatagcctgatgcacattcgggtccagcggcacgttagtttcggcgatcacttcaacaccaaacttacgcacaacatccagcatcgacttcagcgtcagctcaatgccttcaaccatcgcagacatatccgggttagctttatcagccacttccagcgcacgatccaggctatcaatcaccggcagcaattcgttgatgaatttctccagcgcgaatttgtgggctttttcaatatccagttcagtacgacgacgcaggttttccatttcggcttttacacgcaaaatgccgtcacgttcacgggtctgggcttcagccagctgagcttcgagattcgcaattttttcatcgcgcggatccacctgctcagcagaagcttctggctcaactgcctcaatctcttcgtgctgatccatgataatttcttccggggcttgcccctcaggcgttttctgttctttactactcatgaatttctccgcgtttttttcgcattcatctcgctaacttcgcttattatggggatcagtttcagggtttcaagggaagcactcacattgtcatcaatcttcgcaacaaggacctcggaaaaatgaataatcatttcaagtgtattggcattgtgggacacccacggcaccctactgcactgacaacacatgaaatgctctaccgctggctgtgcacaaaaggttacgaggtcatcgttgagcaacaaatcgctcacgaactgcaactgaagaatgtgaaaactggcacgctcgcggagattgggcaactggctgatctcgcggtagtcgttggtggcgacggtaatatgctgggcgcggcgcgcacgctcgcccgttacgatattaaagttattggaatcaaccgtggcaacctgggtttcctgactgaccttgaccccgataacgcccagcaacaattagccgatgtgctggaaggtcactacatcagcgagaaacgttttttgctggaagcgcaagtctgtcagcaagattgccaaaagcgcatcagcaccgcgataaatgaagtggtacttcatccaggcaaagtggcgcatatgatagagttcgaagtgtatatcgacgagatctttgcgttttctcagcgatctgatgggctaattatttcgacgccaacaggctccaccgcctattccctctctgcgggcggtcctattctgaccccctctctggatgcgattaccctggtgcccatgttcccgcatacgttgtcagcacgaccactggtcataaacagcagcagcacgatccgtctgcgtttttcgcatcgccgtaacgacctggaaatcagttgcgacagccagatagcactaccgattcaggaaggtgaagatgtcctgattcgtcgctgtgattaccatctgaatctgattcatccgaaagattacagttatttcaacacattaagcaccaagctcggctggtcaaaaaaattattctaattttacgccagcctctttactgtatataaaaccagtttatactgtacacaataacagtaatggtttttcatacaggaaaacgactatgttggcacaactgaccatcagcaactttgctatcgttcgtgagcttgagattgattttcatagcggcatgaccgtaataactggcgaaaccggtgcgggtaaatctattgcaatagatgccctcggtctttgtctcggtggtcgcgctgaagccgacatggtgcgtaccggcgctgctcgcgctgacctgtgcgcccgtttttctctgaaagatacgccagcggccctgcgctggctggaagaaaaccagcttgaagacgggcatgaatgtttgcttcgtcgcgtgatcagcagcgatggtcgctcccgtggtttcatcaacggtacagctgttcctctgtcacaactgcgcgaactgggtcagttgctgattcagatccatggtcagcacgctcatcagttactcaccaaacccgagcaccaaaaattcctgcttgatggctatgccaatgaaacctctctactccaggaaatgaccgcacgttatcagttgtggcatcaaagctgccgtgacctcgcgcatcatcaacagttaagtcaggaacgcgctgcccgtgcggaactgctgcaataccaattaaaagaacttaacgaatttaatccgcagcccggagagtttgagcaaatcgacgaagagtacaaacgtctggcgaacagcggtcaattgctgaccaccagccagaatgcattggcattaatggccgacggtgaagacgcaaacctgcaaagtcagctttacacggctaaacaactggtgagcgaattgattggcatggacagcaaactgtccggcgtacttgatatgctggaagaagctaccatccagattgttgaagccagcgacgaactgcgccactactgcgatcgtctggatctcgatcccaaccgactgtttgaacttgaacagcgcatctcaaaacagatttcgctggcacgtaaacatcacgtcagccctgagacattgccacagtattaccagtcgctactggaagaacagcagcaactggacgatcaggccgactcacaagaaacgctcgcgctggcggtaacgaaacatcatcagcaggcactggaaacggcgcgcgcattacaccagcaacgccagcattatgcagaagaacttgcacagctgatcaccgacagtatgcatgcgctctcaatgccgcatgggcagtttacgattgatgtcaaatttgacgagcatcacctgggcgctgnnnncgccgatcgtattgagtttcgggtaaccaccaacccaggtcagccaatgcagcctattgccaaagtcgcatccggtggtgaattgtcccgcatcgcattggcaattcaggtcatcacggcgcgtaaaatggaaaccccggcactgatttttgatgaagtggatgtagggattagcggtccaacagcggcagttgtcggcaaactgctgcgtcaactcggcgaatcaactcaggtgatgtgtgttacccacctgccacaagtcgcgggatgtggtcatcaacactattttgtcagcaaagaaaccgatggtgcgatgacagaaacgcatatgcaatccctgaataaaaaaacgcggttacaagagctggnnnncctgcttggtggcagtgaagtcacacgtaacacactggcgaatgcgaaagaactgcttgcggcgtaaactttttttctgcttcacggtcagagtaaacagcaaaacgccgtaagaccggaaagcaaaaggttttaaagtgatgaaaggtctattatcatcggcatattacagatgagccacgtactgctcgggcccgaaaaggaatcaaatcactatgcgctgtaaaacgctgactgctgcagcagcagtactattgatgttgaccgcaggctgttccactctggagcgagtggtttaccgtcctgacatcaaccaggggaactatctgaccgctaacgacgtatccaaaatacgtgttggcatgacgcaacaacaagttgcgtacgcattgggtacaccgctgatgtccgatccatttggtacgaatacctggttctatgtcttccgccagcaaccaggtcatgaaggtgtaacgcagcaaacgctgacgctaacctttaacagtagcggtgtgttgaccaatattgataacaaacctgcgctgagtggtaactaataataaagttgctctcaaagacgttaaaaaaggtgctcaatgagcaccttttttctgtccgttatttattcgctgatttttctgctcgttgcctgcgaagctctttcggatcggcaatgagagggcgataaatctccacccgatcgccatcatgcacactatcgcttaattttgccggacggctgtaaatgccgactttgtttttagttaaatcgatatcggtacgcaattccagcaagccactggcgcgaatagcttcttcaaccgtcgcgccctcctgcagcgtcacgcgctgcaggtactgcttctcaggtagcgcataagccacctcaacggcaattttacctggcactgtaaacctctttcgcacgaaccgtaaaagcctggaccatattagacgccagctctttaaacacgcgaccaaaagcgagttcaatcaacttattggtaaactcaaagtcgagatgaaactcgatacgacacgcctcctggctcagcggcgtaaacttccatccaccaatcaatttcttgaacggcccatccaccagattcataagaatactttggttactggtcaactggttgcgggtagtaaacgttttgctgatcccagccttagagacatctaccgccgcagtcatctgcccaggagtggactccagaatccgacttccggtacaacccggcaaaaactgaggataagactgaacgtcattcactaactgatacatttgctccgcgctgtagggtaccagtgcggtccggctaatctgaggcataacaatttccatcaacaaaaatccaacaaataatatcatttatcctgcagtaaa

SEQ ID NO: 1388 - DNA, 1162 bp, Escherichia coli
  Strain O55:H7
  modified_base (481)..(481): a, c, g or t
cgctgggtaacatccggttcatgctaagatagagccttgtcccccgcaggattgatatggggtattttcgatttcagattaccgatgattcacgacgcttatgacgaagaaaaaagcacataaacctggttcagcgaccatcgcgcttaacaagcgcgcccgtcacgaatactttattgaagaagagttcgaagcgggacttgccctgcaaggctgggaagttaaatccctgcgcgcaggaaaagccaatattagcgacagctatgtccttctgcgcgacggagaagcgttcctgtttggcgcaaacatcacgccaatggctgtggcttctacgcatgtggtgtgcgatcctacccgtacccgcaagttacttctcaaccagcgcgaacttgattcgttgtacggtcgcgtcaatcgagaaggctataccgtagtggcgctctccctgtactggaaaaatgcctggtgcaaagtgaaaatnggcgtcgccaaaggtaagaaacagcacgataaacgttcagatatcaaagaacgcgaatggcaggtggataaagcgcgtatcatgaaaaacgcccaccgttaaacctgcactccaattcttgaccagttcctcaccgcgcctccctctccggcggcgcgaatgaacatcttattggctatcacatccgacaaaaatgttgccatcccattgcttaatcgaataaaaatcaggctacatgggtgctaaatctttaacgataacgccattgaggctggtcatagcgctcataaatctggtatactcgccgttacacattggggctgattctggattcgacgggatttgcgaaacccaaggtgcatgccgaggggcggttggcctcgtaaaaagccgcaaaaaatagtcgcaaacgacgaaaactacgctttagcagcttaataacctgcttagagccctctctccctagcctccgctcttaggacggggatcaagagaggtcaaacccaaaagagatcgcgtggaagccctgcctggggttgaagcgttaaaacttaatcaggctagtttgttagtggcgtgtccgtccgcagctggcaagcgaatgtaaagactgactaagcatgtagtaccgaggacgtaggaatttcggacgcgggttcaactcccgccagctccaccact

SEQ ID NO: 1389 - DNA, 32 bp, Escherichia coli
  Strain O55:H7
  modified_base (28)..(28): a, c, g or t
cggttcagtaacacccgatactttttcnaggc

SEQ ID NO: 1390 - DNA, 37 bp, Escherichia coli
  Strain O55:H7
  modified_base (11)..(12): a, c, g or t
tactgtagttnnctttacgatttatagctgtactggt

SEQ ID NO: 1391 - DNA, 21 bp, Escherichia coli
  Strain O55:H7
  modified_base (5)..(5): a, c, g or t
  modified_base (9)..(10): a, c, g or t
ggganctcnnttcgtagtttt

SEQ ID NO: 1392 - DNA, 70 bp, Escherichia coli
  Strain O55:H7
  modified_base (38)..(40): a, c, g or t
  modified_base (43)..(44): a, c, g or t
  modified_base (46)..(47): a, c, g or t
caatatccgactcgatatgtttctggtaaaacttgtcnnnaannanntttgctatggtatctgatgtacg

SEQ ID NO: 1393 - DNA, 23 bp, Escherichia coli
  Strain O55:H7
ggctcataccatcacaaagagca

SEQ ID NO: 1394 - DNA, 23 bp, Escherichia coli
  Strain O55:H7
  modified_base (11)..(12): a, c, g or t
ttgtgctgccnnaacatcaaggg

SEQ ID NO: 1395 - DNA, 23 bp, Escherichia coli
  Strain O55:H7
  modified_base (11)..(12): a, c, g or t
  modified_base (16)..(18): a, c, g or t
agaaaaaaganncttnnnctctc

SEQ ID NO: 1396 - DNA, 46 bp, Escherichia coli
  Strain O55:H7
  modified_base (6)..(7): a, c, g or t
gtaatnntcaatctcctggttgatcacccttgagggatatactatc

SEQ ID NO: 1397 - DNA, 46 bp, Escherichia coli
  Strain O55:H7
  modified_base (42)..(43): a, c, g or t
ctcatcaatatctttagtactctgccttctcaccgtttccannata

SEQ ID NO: 1398 - DNA, 94 bp, Escherichia coli
  Strain O55:H7
  modified_base (13)..(14): a, c, g or t
  modified_base (89)..(90): a, c, g or t
acctcatcattcnnccctcggaaagagttcctgaaggagttttctctatggcaacttataccaaaagagctgaaagacgtacctgtagnnttca

SEQ ID NO: 1399 - DNA, 20 bp, Escherichia coli
  Strain O55:H7
  modified_base (3)..(6): a, c, g or t
  modified_base (8)..(9): a, c, g or t
cannnnannataacaaaaca

SEQ ID NO: 1400 - DNA, 27 bp, Escherichia coli
  Strain O55:H7
  modified_base (22)..(23): a, c, g or t
aaatccgttcctgtatggttgnntaca

SEQ ID NO: 1401 - DNA, 20 bp, Escherichia coli
  Strain O55:H7
  modified_base (10)..(11): a, c, g or t
ttacagatgnngtaaaatca

SEQ ID NO: 1402 - DNA, 21 bp, Escherichia coli
  Strain O55:H7
aaaagacaatgcaaaaccaaa

SEQ ID NO: 1403 - DNA, 33 bp, Escherichia coli
  Strain O55:H7
agaacgagacgtaagaatgttcgaaaatattag

SEQ ID NO: 1404 - DNA, 99 bp, Escherichia coli
  Strain O55:H7: Synthetic oligonucleotide
gttttcccacgtcccgtcagcacgcaggatttgcagcggtcttaccacacactgtatctgctttttatctgcatccagtatcaccacctgtgtgattac

SEQ ID NO: 1405 - DNA, 159 bp, Escherichia coli
  Strain O55:H7
  modified_base (130)..(130): a, c, g or t
tgccggtgcatttatctccagcaccagactttctatctcaacgccatacgctgcattttttgtaacatccgtcagcgtcagcgcattcagtcccagtgtcagactgtcttttataacctggaatgccggnccagccactccattcagtttcggagtaac

SEQ ID NO: 1406 - DNA, 41 bp, Escherichia coli
  Strain O55:H7
cggcggtgaacaccagctccagcgcctgccagtcgttactg

SEQ ID NO: 1407 - DNA, 34 bp, Escherichia coli
  Strain O55:H7
  modified_base (27)..(30): a, c, g or t
cgaattcccccagcttcgtgtttcctnnnntcct

SEQ ID NO: 1408 - DNA, 38 bp, Escherichia coli
  Strain O55:H7
  modified_base (7)..(7): a, c, g or t
  modified_base (10)..(10): a, c, g or t
  modified_base (37)..(37): a, c, g or t
ggtctgngtnaagtacgacatcaggaacggattaccng

SEQ ID NO: 1409 - DNA, 22 bp, Escherichia coli
  Strain O55:H7
  modified_base (2)..(2): a, c, g or t
  modified_base (7)..(7): a, c, g or t
tnatcgncacaccatcaggaac

SEQ ID NO: 1410 - DNA, 22 bp, Escherichia coli
  Strain O55:H7
  modified_base (4)..(4): a, c, g or t
  modified_base (18)..(19): a, c, g or t
cagncggaacttacaggnnagt

SEQ ID NO: 1411 - DNA, 34 bp, Escherichia coli
  Strain O55:H7
  modified_base (3)..(3): a, c, g or t
  modified_base (6)..(6): a, c, g or t
atntcnaattcaccctgcatccagcataccgcca

SEQ ID NO: 1412 - DNA, 28 bp, Escherichia coli
  Strain O55:H7
  modified_base (2)..(3): a, c, g or t
  modified_base (27)..(27): a, c, g or t
gnnctcatatcctgcacatcatgcagnc

SEQ ID NO: 1413 - DNA, 44 bp, Escherichia coli
  Strain O55:H7
  modified_base (8)..(8): a, c, g or t
  modified_base (20)..(23): a, c, g or t
agtaccantccggctcagtnnnnccactgaccaccacatcacct

SEQ ID NO: 1414 - DNA, 46 bp, Escherichia coli
  Strain O55:H7
  modified_base (31)..(31): a, c, g or t
  modified_base (44)..(45): a, c, g or t
catcagggtataaggagttatggccacaggnctaccaaacggcnnc

SEQ ID NO: 1415 - DNA, 99 bp, Escherichia coli
  Strain O55:H7
tttgcgtgagcttgtccgccagatctgatggcgatgctgcccgcacaatatcgtaacgattaatcgacatcgaatttctcccatgcacaggaatagagt

SEQ ID NO: 1416 - DNA, 21 bp, Escherichia coli
  Strain O55:H7
  modified_base (16)..(17): a, c, g or t
acaggatgagcatctnncagt

SEQ ID NO: 1417 - DNA, 56 bp, Escherichia coli
  Strain O55:H7
atgcgcagccaaaactcacaaggaaaatgataagtagaatcacaactttgatatat

SEQ ID NO: 1418 - DNA, 98 bp, Escherichia coli
  Strain O55:H7
  modified_base (3)..(4): a, c, g or t
  modified_base (7)..(8): a, c, g or t
atnngcnnctgaatccgcgccccccagtattccagcctgctgataacctcttacacatgggattcgctatacggcagtatttctaataaacagtaagt

SEQ ID NO: 1419 - DNA, 256 bp, Escherichia coli
  Strain O55:H7
  modified_base (104)..(105): a, c, g or t
  modified_base (107)..(108): a, c, g or t
  modified_base (110)..(111): a, c, g or t
  modified_base (147)..(148): a, c, g or t
  modified_base (178)..(179): a, c, g or t
  modified_base (183)..(184): a, c, g or t
caagcattattcagactgtttcttttcatcaccgaccaccgtaatgtcacaatcccacgcttcatcacaccatcagccagtaccgacatcagacgcccggtganntnnanngccaccaccagaaacaacatgatgacagtcagcccnnagcgtgcactttccacaggtactgccccannggtnnctgcagagcctgcgccagtgggtaaccagcctacggataaagtcacactgactatcccgtaaccccgtccct

SEQ ID NO: 1420 - DNA, 66 bp, Escherichia coli
  Strain O55:H7
  modified_base (28)..(29): a, c, g or t
  modified_base (40)..(41): a, c, g or t
gatatgcaccgaacgtggcgcagatatnnaaaaagcccgnngaagcgagactgataataaatctgg

SEQ ID NO: 1421 - DNA, 205 bp, Escherichia coli
  Strain O55:H7
  modified_base (51)..(54): a, c, g or t
  modified_base (56)..(57): a, c, g or t
  modified_base (59)..(60): a, c, g or t
gggaatcgaacccgcatcatcagcctggaaggctgaggtaatagccattannnnanncnngcatatggtgccgactaccggaatcgaactggcgacctgatgattacaagtcagttgctctaccattggagctaaaccagcatgtttggcgggacagcgtggactcgaaccacgataagaaggttaacagccttccgtaatgacc

SEQ ID NO: 1422 - DNA, 121 bp, Escherichia coli
  Strain O55:H7
  modified_base (21)..(22): a, c, g or t
  modified_base (38)..(39): a, c, g or t
  modified_base (48)..(49): a, c, g or t
  modified_base (53)..(54): a, c, g or t
  modified_base (81)..(82): a, c, g or t
aacttaagagtcactaacggnngcttaccttctaattnnggccaaatnnatanntgcatgtcaagacttttaacagcaatnngtttaactttctcaacacgtttacgcattttgaaagcat

SEQ ID NO: 1423 - DNA, 75 bp, Escherichia coli
  Strain O55:H7
aacaaataatgatgctttcaggatgtcgtcaatttcatttctacaggttgccagtgaaggttttctccatccctc

SEQ ID NO: 1424 - DNA, 29 bp, Escherichia coli
  Strain O55:H7
acgtccacacatcttgcgtggctttgcag

SEQ ID NO: 1425 - DNA, 53 bp, Escherichia coli
  Strain O55:H7
gcaattgctcgcttagatgaaccatgagcgtagtagctgaggaggatgccaaa

SEQ ID NO: 1426 - DNA, 65 bp, Escherichia coli
  Strain O55:H7
gcacatgacggaatcgacgacctgagaaatcaacattccatcatcatcattgcacattggccttg

SEQ ID NO: 1427 - DNA, 57 bp, Escherichia coli
  Strain O55:H7
  modified_base (29)..(30): a, c, g or t
gcttttccagacgacctgaataaacccanncgccccacagttcaagccagccattca

SEQ ID NO: 1428 - DNA, 22 bp, Escherichia coli
  Strain O55:H7
  modified_base (13)..(14): a, c, g or t
  modified_base (20)..(21): a, c, g or t
gctgttctttggnnaggttnng

SEQ ID NO: 1429 - DNA, 28 bp, Escherichia coli
  Strain O55:H7
ctgaatcaatgtgaggtttccgcagaac

SEQ ID NO: 1430 - DNA, 24 bp, Escherichia coli
  Strain O55:H7
ccagtatcgatatacatctggttg

SEQ ID NO: 1431 - DNA, 22 bp, Escherichia coli
  Strain O55:H7
gtgagttgctgattcgttcgcg

SEQ ID NO: 1432 - DNA, 86 bp, Escherichia coli
  Strain O55:H7
  modified_base (24)..(26): a, c, g or t
gtgattgacgtttccacgctctgnnnagccatcaatcatcatttgctcatggtttccacgtacagctctgaaccaggggaatgtga

SEQ ID NO: 1433 - DNA, 69 bp, Escherichia coli
  Strain O55:H7
  modified_base (28)..(28): a, c, g or t
  modified_base (43)..(46): a, c, g or t
  modified_base (53)..(54): a, c, g or t
  modified_base (56)..(56): a, c, g or t
  modified_base (67)..(67): a, c, g or t
gttctctgtaccgcgatcaaccaaatcncccaccgagataagnnnntcttttnngntgtcgaatccnat

SEQ ID NO: 1434 - DNA, 170 bp, Escherichia coli
  Strain O55:H7
  modified_base (82)..(85): a, c, g or t
  modified_base (92)..(92): a, c, g or t
  modified_base (121)..(121): a, c, g or t
  modified_base (140)..(141): a, c, g or t
  modified_base (165)..(168): a, c, g or t
tcatcaggttcgtgtagcatccgtgcagatcgccaactacccaaatatttcggtatttgctgccatcaattctttcgtagannnncatgcancctcacttctgctgtttcgcagttttttnagtttctgttgatactccnncttgatggccctgcactcttcgannnncc

SEQ ID NO: 1435 - DNA, 38 bp, Escherichia coli
  Strain O55:H7
  modified_base (2)..(2): a, c, g or t
  modified_base (36)..(37): a, c, g or t
tngcggttatggtctgattcgatttcctctactgcnnc

SEQ ID NO: 1436 - DNA, 23 bp, Escherichia coli
  Strain O55:H7
tgagcgttccgcacgagatacat

SEQ ID NO: 1437 - DNA, 54 bp, Escherichia coli
  Strain O55:H7
  modified_base (3)..(4): a, c, g or t
  modified_base (50)..(50): a, c, g or t
gtnnatctttctgtttctgctcctctcgtcgtcgtttcttctctgctgcntttt

SEQ ID NO: 1438 - DNA, 187 bp, Escherichia coli
  Strain O55:H7
cgtttttctgaccttggcaggttgttcttcagtaggcaaccagtcattgaaaaatgagacgcaggaaagtgtgaaaaccaaaattgttaaaggcaaaactacaaaacaggacgtgttagcatcgttcggtgaacctgacagccgttctttgatcgatggtgaagaacaatggtcatacactatgtat

SEQ ID NO: 1439 - DNA, 234 bp, Escherichia coli
  Strain O55:H7
  modified_base (44)..(44): a, c, g or t
  modified_base (150)..(151): a, c, g or t
agcaacctctttcatccccgttgtgggactgcttgcaggtggcncagactcacaaactaaatctctgacagtttctttcaaaggcgaaaaagtcagcacatacatctttaatgctggaacaagcaacgtgaagactggcattttttagannaaagacaaaaccagcatcaagggaaaatttagcccgcagttgatacctacgggctttttacagaaacataaatcactttttaa

SEQ ID NO: 1440 - DNA, 104 bp, Escherichia coli
  Strain O55:H7
  modified_base (13)..(14): a, c, g or t
  modified_base (100)..(102): a, c, g or t
ttatctttttcannctcccccaaactttactgttcatttctacagtctcagtattttcctttaaagaggatcttattggctctggctctggctctggctnnngc

SEQ ID NO: 1441 - DNA, 197 bp, Escherichia coli
  Strain O55:H7
  modified_base (156)..(157): a, c, g or t
  modified_base (196)..(196): a, c, g or t
ggctctggctctggcaaaggagaactaaaatctaatgaagtttcaatattatattcatgatttttatggtctatatcagataatgaaatgggttgttcattcaatgatgatacagacagatcattttcaatgtaataattactatcattatatganntttcaaatttacccaagaaagccacatatactaatttana

SEQ ID NO: 1442 - DNA, 535 bp, Escherichia coli
  Strain O55:H7
  modified_base (350)..(353): a, c, g or t
  modified_base (472)..(475): a, c, g or t
  modified_base (532)..(533): a, c, g or t
ttgtcttaaatagaaacttatcattttcatccggcatcccaaaaaagaaaaccgtcaagtattttttagcattccttttatctttaagccccttataatacctatcagcttccttcctttgcttttcatattccttccaaaacacatccttctgacttttattccagtcagaaacatcaatttcaagcgtaaatggttttgggttttcttatcccttgcgaggaaagtaatacaatgtttatctgaatcttcatgcagacgaatattagactgggctacaccataataaatagcaggtttgtaataacgtatgttgtttttgtaaaaaataagttgaaatgtatctttannnnatcgcgtgccatatggagggattgatagctgttcattatgattgctattatttatgtaatagtcaacgactggcttaatacttgatgaagatacaggatgttcattaccttttttttcnnnnttgtgattttcatttttaatatttctggcatttttaacaccacctcttggtttcacnnca

SEQ ID NO: 1443 - DNA, 397 bp, Escherichia coli
  Strain O55:H7
  modified_base (94)..(94): a, c, g or t
  modified_base (282)..(282): a, c, g or t
  modified_base (359)..(362): a, c, g or t
tgatataaccggagcaggtggcgaattatgttttctttcgtcatttgaagtatgattgtttttatatcttggatcatgaataccacatccatcnttatgtttatcgccatatctgaaatatgattgattaacatgtttcatagtaaaactacaaggtgtggctttaattttacaaggctcgtatgggcattcaaaactcgttgtcttaatgtaaaaatcatccattccacggagatcatttccatgaatgatttcatcagtcgaactatccttcgcaatcgncatatcttaaccctatgaaaatctatgtccttctaaggattctagctttttcttattgacgatccaatcaaaaaatnnnnctccaacttaccaaaatacacgatcaagcagaagt

SEQ ID NO: 1444 - DNA, 127 bp, Escherichia coli
  Strain O55:H7
ggggtagaattagtatttttcaaagaaattaaatgtttgacagaatgatgctgaataacatcgctaaccttagtaaggtcagggagttgttatacacaactcccctctattatcgtttgttaaaggt

SEQ ID NO: 1445 - DNA, 39 bp, Escherichia coli
  Strain O55:H7
ggtatgtatgcatggtaacagtaaaagcatcttagagga

SEQ ID NO: 1446 - DNA, 38 bp, Escherichia coli
  Strain O55:H7
taagcattaattagattcatggaattatagatttacga

SEQ ID NO: 1447 - DNA, 504 bp, Escherichia coli
  Strain O55:H7
attaaaatttagactatagattaagtaagtctaatgaaaatcatacaaacactacaacccatatcttttccttttatcctttttcgataattctctttttagagttgaagcctcatatttccttttctcattagcatagactttctctgttcggctaccattactgactataaagttaatcaatgaagaacatacatgcttcatacgctctttgttgatcaaatcatcatccagtttatttatatgactataatatgaaagtagcagaaaggttaaaacaacctccctgttggagaaggtcattttttctataccactctggtatttgatataaaatcctgcacaaaaaagatatgattgttcgataattcgttgctctgagaaacctgattcagcgagtttatcaacgaatcgatcaagcagaagaagatacctttccattaagttaatatttgttttgtccataatatgcatccttgcaatagtgaaattttgtcgtcctga

SEQ ID NO: 1448 - DNA, 536 bp, Escherichia coli
  Strain O55:H7
taaataacataatatttcaccatgtcaatagctaaaacctatcaattttattaaaggtattttgcaggtaacggattattaagttcttcaatcgttatttgtttaaggtgagcattataaagccatactttgaactgctctaaatagcgttcatttaatgccttcaaagcttcattttctgcttcaagtcttttaattcgttgagaagccacttttaaattagcaggttttacagtgtgtattacaccagatttgattgtgttttttttcacatttgaagctttccgcaatccttacatgactacttaaggattgtcttgatggtcttttcccaataaccctgactaacctatcgcacaaagcattccaggttagtttttcatctatagaccatgtgttaataacatctacaatcttcttctcatgataaccatttatatgcttagccatttattctcctttttttatttttttatggaattcataccatttatcagcatttatgttcccatcatttttatcatacagtgttcttt

SEQ ID NO: 1449 - DNA, 4179 bp, Escherichia coli
  Strain O55:H7
  modified_base (138)..(138): a, c, g or t
  modified_base (323)..(323): a, c, g or t
  modified_base (362)..(362): a, c, g or t
  modified_base (411)..(411): a, c, g or t
  modified_base (426)..(426): a, c, g or t
  modified_base (1522)..(1522): a, c, g or t
  modified_base (2994)..(2994): a, c, g or t
  modified_base (3029)..(3032): a, c, g or t
ttatcgtggatatttgaaatcgtttcgttatctaaaccagagttcttaattggataattatcacacggcttaaacgcatatgagtgcttgcagtagccatgttttgatacaagtactgcaccactactaagtgagtcnaaactcattaagatccactactggaatatcctttattctgtgctcattaacacatactgataactttttttctcttattgctttagacatttgaagatgcgatctgtggtcataagaaacattttgagaaataagcttacgtccagaccagcgagcaatactaaattcatccataccatttattngagcaaatgtgttgagaagatgccttagttgatgtgttnttagcaaatatgggctaccatcttcatttatataaccatgtcttttaanaacattaaaataccnttttatataatcagaatcaatgatatcagttttaaaaaaattcgttgtaggtctgaataatttatctgacatttcctttttatttttatttaactgtccttcagttaacaagcaaagcgcattagaatatttgattttcttctctctatcataccaaaagagatcaggaggtatattttctttaagggttcccttcgttgaattagagtaattcttttgaatttcagcagccaataacctcgcttgacttgataattcttttaatctgctaatagcctttttagctacaggtatcattaaagttggaatccattttatattgccttcatacccttttgctgaaaaaaatcttaaaccgtatctttgaatgccctttccatcacattctgtgatttcacaatccgctggcaaagctaaaatttccgatatcctactcggtgcacacataagtaaagcaagcacagatgtagtaaatatatctcttgacgataattgttcatcccgctttgaaaaaatctcagcaatcgcaataactgatttgatatcaggcaatctagaatggccttccagtgaagaatcataaccagtccaagactgagtaatcctatacctaattggatttacccaaaataaataaaatgagttagtcatcctattatcatttaaaaatgaactcaatttctcaagttctttcccaatagcaaatgcatgtgctttagaatacttttcagaggctatccttatgcattcatcatagattgaattgttgcaatagtttacattagcttccatattgattttaagtaaaacgaattcgacaatcttcaacattgataatgttgagtgtttcgtcttagatttattgaatgaatgcacatgcaacatatatgctttagcaaaattaataaagctatcatctaagcactccttgctgtttaggttgttttttgagttaaacttagtaaacctatataaacctttccatttattgctttcccatgaagttgttaaattattattagaaatagtactcttacaaaactcgataaacttaataacattatcgagagggttgtttttattgcttggttcaaanataaatatattgttcataatgctctccagggattgaattttttacacgttaaacatttcaaatcctctttcgtatcttccaataagaaaaatgcatctgaaacaaacttgataaaaaagttcttgttttcttcaatctctatgcccataagtatattagataaggggttaaaaaacgcacttagtctcttatcgatgtcataaacgttgtcaggattattttttatatatattatagaagagtttactgatttatgatctaacgctttagcaatcacctcaattgaggctccttcattagccagtcgacttcctaacgtatatctgaatcttctagcattaagttctatatagctgttagtcctttctgacctaacatcgaattttgacggaaagtgttttaatagttttgacataactgaatttttcatatggaaaaaatctgttgttaaatcatataaaaaatcctcaatcctttttgtttccgtaatcttatctaaattcatgaagattggtaattcgcctctatagttactaatcccaacactgaatttatcttcaacaaacgcctgattttgattaattagcattgataagctgtcatataagaacggctctatcataaccatgttaaattcttttctgaaacattttctttgttttacttttggtacattcaaaaagcaccctctctcatttttaatgagatctttagcttttagagatattaattgtaatggccttcttcctgttattgccagcaaaaggatataacaatacaaaaagcattgaattttcttctcatgataaaattttccaacggcgttaatgatgttattgaattccgtttcagttaaaggtcctttatttggatctcgtcttttaactgcatctcctgtttggtttggaatgatttttattttctccagcattctaatggcagtcgcttctaccccagggtaattgagatttttccatttaatgatgaaagccttaattaagtttagtttgtagtttctttctgaacctaaataaatattcaattgatatattgctttgtcatcaatagtatcgatagtcatcgcaccaaaccactcataaaatagattattaatactttgaatataaaaagaactatattcagacgcatagtaagccaatgtttttaagtagctaagtttcatttttgtaggcattctatctacaactttatgagggtatacgcagttttctttatccagttgccatttcttatctgacagtttgaaactatacctgttcatcttagcaaaaaagatttgctcactttcaatacatttgttttccatactaaactccactaattattttacttactgatttatagacctttaggacgacatccttctcttgttgcgatatatatttatagttgtatctatcacacattattgactcctttgaccaacccattaaataattccttaaatcttnccttctattatattctaattcagcaccttctattnnnnttagaatacatataattccaagagtgccttaacctatggcctgaaagattatatagctctggacttgctcgtttcagtgttgatatcaccttctcataagctgaaatgcttaagggttctcctgcgttttttccggtgcaatgagccacaaataagaaattatgctttttcctttttgtcattttttctctgctattgcttatgtaatcaaaaatttcacgggctaactcattagataacggaataaccctttctccagtctttactaatggttgataagatcttccatcttcttttgaatcatgtcttctgactacacttaaagtgttgtctctgagatcaaaatcatctattttaagattgagcaactctccagcccttaaacctaaatttaagagcaaggtaaatattagtctgttcctgacctgtacttccttatggaaagggttttcaatcccgccaatttccaatagacggaaaagcactttgatctcttcttcattcaacgatttttcagatatttcattcatattcaatgaactgtttcttggaatatgtgctctgatactttcaataaatacgtctacttcatactttgcatgaatcccctttgacgaatgaactaatccacataaccacttaaggtagcgtgaaaaaacgtgtattctataactaaaggttctcttcgcaataaacctataatttgtcgattttatatttatgattttttgtctgtcgaatctttgtttcgcatatcttaccagatcatctatttctgcaacgctgagatattttttaagttcaactctctcaattatatcaattcccctaccatccaagaaattactgaaaattagtaagttagttgcaactatttccatcgttgaggccgttgcgcctctatttcttatgtctgtagtaagaaatagattttgatagtaagttggtagattactttttttatcaaggatcaggcatcctcgctctccactactcatgatgaatttctttactttatatcccattttcacctcaaacttaacaaattaatatcactctcacttattaaatatattccaattcaaaataattcaaattttttacaatgaatcttgtttaattggtatatatattaatggcttgaaaa

SEQ ID NO: 1450 - DNA, 18020 bp, Escherichia coli
  Strain O55:H7
  modified_base (2551)..(2551): a, c, g or t
  modified_base (3142)..(3142): a, c, g or t
  modified_base (3441)..(3441): a, c, g or t
  modified_base (3485)..(3485): a, c, g or t
  modified_base (3873)..(3873): a, c, g or t
  modified_base (4020)..(4020): a, c, g or t
  modified_base (4707)..(4707): a, c, g or t
  modified_base (5322)..(5322): a, c, g or t
  modified_base (6308)..(6308): a, c, g or t
  modified_base (6931)..(6931): a, c, g or t
  modified_base (9198)..(9198): a, c, g or t
  modified_base (9202)..(9202): a, c, g or t
  modified_base (9716)..(9716): a, c, g or t
  modified_base (9802)..(9805): a, c, g or t
  modified_base (10541)..(10541): a, c, g or t
  modified_base (10572)..(10575): a, c, g or t
  modified_base (12147)..(12150): a, c, g or t
  modified_base (12387)..(12387): a, c, g or t
  modified_base (13029)..(13029): a, c, g or t
  modified_base (13031)..(13031): a, c, g or t
  modified_base (13115)..(13115): a, c, g or t
  modified_base (13275)..(13278): a, c, g or t
  modified_base (13678)..(13678): a, c, g or t
  modified_base (14251)..(14251): a, c, g or t
  modified_base (14289)..(14289): a, c, g or t
  modified_base (14493)..(14493): a, c, g or t
  modified_base (16165)..(16165): a, c, g or t
  modified_base (16384)..(16384): a, c, g or t
  modified_base (16410)..(16410): a, c, g or t
  modified_base (17101)..(17101): a, c, g or t
gacgtcaaataaacaggtacggctagtgggctgtatccatacccgatattaagaaaaccatctctaagccttatagcaaaagctctgccagaaaaaacgtaaagaattacgttaaatatagatttttttaagatttaaactttacaaatctgagaattaatcctcataaataagaagactgtcattttatttcaggcaacatgctttcttgaattttcgatagttaattgaatccattcgtttacttcactttcaatgaaagcaacagagcgcgcaccgattttaacgggggaaggaaaacgattttggttgatgaggtgatagatccaagctttaccgtatccagttcgatgcagaacctctggtaaacgaataaggcgggtgttgtgctgattcatagtcgtttcctctgtgccgttttgatggaaatgactatacaaatgaatcagcaggaaaaagaccgaagctgggaacgccagagctaatggaggttggtcttagtcagaatcagcgattttcatcacgtctgaaactctgatctttttcaaatggctgttcttgttgatgaacagattaaactggcgaataaaaggtatactcgccgccttcaaagcaagaggtttgtctgtatccctgatttggtggttcaggcgagtgttgatctcatcatcgtcatctgtatacaacaggcgagaaaggcggtcttctgatatacgtactttatataattttgaccataccagaatgtcgatcatgggaaggagtctgtaattaatgattttcttaatcgttccataaccaaagcgaatagcttccgttacatctggttctatgccacgcactttacgccattgaggaagtgcagcctttagggattcagcgatctcttcatctgtcccgtttgctaggtcgatttcgaccatgacagtatccctgaacaattttggcaaaacttccgatacagggctatcgaggaattctctgttaacagaatactcatcgcttccatcccaaaaaaacagtgagttccgtaatccaactatgctgagttgagccagtctttcggttgtcgtcaaaaagaagtgcgggggctggtaaagagtatcctctcttgtgagatagccgagatgcttttctgtgatgagaaagggctttccagtgaagatcctgtcgatgtagagccttacggcttctgcttcaaattcttcatgatatggtttgaagaacaatgtccttgccagcaattcatggtagaggtgtataagcggaagctcttcgaatccgcgatatgtatctatatccagccacttcttcacctctctcgtatgttcaactgaccagtttttcataacgatctccaacaggcattagacttaatgtatgtagcaaacgtaatcgacatgttaaaggaagaccaatgaaatgagttcagatgccatcaggaagttgaaccaaaaggtttgatattttttgatacagttcgctaacggactattttcaggggtttatgccgttacgatttatggttcctttatagaaccaaaggtaaagtcagaaacagcagttatctagaaaattcaatcaaatagatatctagttacagggacgccagccaatcatgattggacggtgtaaggacaacaccaacaaaaacaggaagttagaagtctcagcaggacaccgaccagacggtgaggagacataaaaggatacgcaaaggagccgcggctcctggtgacatgaaagcccacagatgtgggctttttcgttgatggtcagaacgaccagttcacaccagctaccgcgttccacggggattccacaccggcaccatggctataccccaccccaagatgcccgcttaacgtactgctgaatgaggctttaatacctgcctggtatattccacgtctgcccgacaaatcattgacgaaattaccgtcattattcaccttcacccggttatcatcgacaaattctttgcgcacagccgccttcagccacggctcaatttccataccgttccccagacgcatgttgtaactcagcgttgcgcccagttcacgatatatactgcgggtatcgactgatttcgattccatgccattggataaatgatattcggggttatcagcggtgaaccccgttaacgatgcatacggcgtcaggttccagttaccatcggtaaatcgcatcccggtttcaatgtgaccgcccagcccgttgctgtggtaactgccattggcggctccaccgctgctcattttaccggctacgttactttcaaaacggttcagcttcacgacaccgtccagatagaaaccactttcatgttcccaactggcatagccgcccagagaataactgcccacactgccatgtcctccgcgatcaaaaccgatatgtgaatgggaataacccataaaagcgcccagcgtcgcaatcccctcaggaatatcattagggctgtcgatccccactgtcattccggtcagcgtctgctcaaacccggcccccgcatcggtggtgacattattacgggtgttatacntcgccccccagacattattgttgtgtggactcgctttcattatgttcaaccgctcgcgaatactgtttagctcagcatcaaataccaacggtaatgttgctgccatattgagtacggctgcggtagaaggcgtgatgcgtttctccggaacgggtgtcggcgttggctcgggagtcgggtctggtttcggatccggttttgggtctggttttggatccggcttcggatttgggttgggatttgggttgggatccgggttgggtttgacatcattggtcaggttccagttgctgttgccatcgcttttcaggacatactcataggtcccaagatcaacgaaaccgccagtattgcccagcgaaaacgaagcatcccctccccctgttttcaccagcgtcatcgcgtcgtcagactgaggactgacgccggtatcctgaacaaagattttaaaattaccagtggcgttgttgttgacgaccagttgatcgccccgagagcctgcaacgttggtatgcaggtagaaattaccgctaccggaaagttcattggttgtcagcgtattgtatataccgttagttgtggcaggcgctnctgtttgtgctgataaataaacattaccgtcgttaagtagcaaactgtttactctatactcgcagttgctggtgcctgcacaggaattattgctgttaagccagacactgccccggctggcagccgtcaggtcggcaagcgtcgtatcaacgccattgccgatagttaatgtcgcgctatcggtaatccggatcgccccttcgagtttaactggcgtaacattatcccgtggcgtcattaacgacaggcttcctgtcgcgccactgaccgatgcatccgccagcgtacctgcgtagacnattgctgtcccgccagcaacctggagatcttctgcccgggccanagcctgaaactcatcttttgaccgcccaagggtatattgcccaccagagttaacctttgtggcggagtcctgaccctggttttgcattgccccccccttgccaaccgtggagtcgcgagcttcggtacctgctaataccaataaattaccgccattttccagcaacatattggtcgctaaattgccggaaatggaaaaagtgccgtactggtgagtaccgctgatttcaataccgttagccgtgctcgtctggagagcggcaccgctgttctggacgatatctgtcgctttgccattatcgttgactgtcagcgtaccgccttcattgatcgttgtttttattgcctctccgttagctgaaactgtttgtattccgccgtcgttaatngttgtctcattcgccacaccctcgacaatttgttcaccgccggtgagcgtcgtgcctgtcgcagtggcttttgttttgacgatctcccgtccgcccgtattgacctgtgttttgtcagaagaggtgtctgactccacggttaacacnccgccatttgccagcaggatattgttcgccgcaccctgctcgatgctgaacgcgacgccatccgcgcgtgttcctgtgacccgcgtcgccctggtggttgcaaccaacgcgccctggctactctgctgtatccccgttgcgctgcctttctcccgcacatcgagtgtgccgccatcattaagcaccgagttttcagccagaccgccctcattaactatctgtgaaccgccattaataatggaaccttccgctgtcccgtttgccataatttgttgtaggccagagacgatatcggtattgatcgccttaccataattctgaacggtttgcgtgccaccattgatgtgtgttttctctgttgacccaccatcaacaatttgttcaccactttcgatatttgcttcagtggctaaaccatataccgtttgcttgccacctttgatatttgctttatcagaagtggcactggcatatattgtttgggtgccagcactattgagtacagtgccaacatcttttccataaacatccattttgccgttggcattaataatcgtgtcaactgcccgggaaccagtgacgactgttaatgagccagcgttttccagcactacatttttagcttctgaattcatgatgtagaaagcatcaccataactgttggttccttcgataagtgttccggangtcgtggaagcaattaatgcgccgccggattgttgctcaacatgcttagcctcaccaccgtcctgaacctccagaacgccgccattattaagtctggtgctatctgttttagcctccttctggacaatcagcttaccgccagcatcaatggtagtatttttcgccgaggttttagccactaccgtcagttcgccggtattttccagcacaacataattagcctcccctccggtaatagtgaagtgagagagcttgttgtatccttcgatatcagtccctgcacccgtgttggcaactaaagcactgcccgtctcctggttaaccccatgtgcaataccgccggtatagacaatcagcgagcctccggcgctaatattgctgccaattgccgtaccatctttctcaacaacctgccggctcccggaggatataattgttgtgtcagctttcccgccgcttttgatattttgcgttccgctgttgatattggtgcctgtggctatgccataattattaatattctgtgtgccaccattaattatggtatttgtcgcgtttcctgcaacatccataaccccgccattatctattcgggtcgcatcagctttagcattngttaaaactgacattgttcctttatckttaataatcgtcttgtttgccgaaccatatgcgtttatgtctaaatgaccaccgttttccagcaacacattgtctgccacgtgattgtggatggagaatgcaccttcactattcgtaccgctcaccgtcgtaccgttagtgttagtttttaaaattgcaccatcgtgctgggtaacatttgttgccgtaccaccactaacatcaagcacgccaccggaataaacttcaataacatccgaggagctggtgttatcaataatttgcgtaccaccagaatagatctgagtattttttgccgttgacttactattcagagactgagttccgccttcaatcgtcgtgtccagcgcacggctctcatatactctttgctcaccgccatttttgatggtggttgtttctactgtgctctgttcaacatactgtcgaccaccatttatggttgtgttcgttgccagacttccttgtactacgtcctgagagccagacttatttatcgttgtaccatcagcatgcccttgaacttttactatctggctaccaccatcaatgagtgttccattcgcactccctccctctacgcgtgaagcaccgcccttaattgtcgttccattgctgataccccctttataaacgtcctgattgccactctcgattatcgtacctgtggaaatacccccgtcatgaattgactgtctgcccccgttaatggtggtattattagactgccccacataattgttatgccttcctacatcttgatatccaccagattcaataagacttccattagataccccgccataaacattctgctggccatggttgataatatgagtgttatttgttgtacctcgttcatctactcgttggctgccatctacagtctcatcgtttaccacaccaataacatcaggagtgaaggcagccatcccgggcggggcatatatcaaggcagntatcaataaggaaagtactgagcgacgacaataatagggactggtcctgttcataaatttcatcctctgaaaagtgaatactgagtagcgtttaagcgaccttagctttgctgcaacatcagcccacaggcaccagaccaggggattcatcctgaagagacagcgcaagtgtattgtgttcaccgctcatcaaagacatcatgatgaaatgatgatattccgcataagaatgaggcattttttaaacgcagtgcgctgaagtgtggttggataaaaaagtcaatccattcaggaaatacgggcgtattcttttctttcgacaatgaggccgttggcaaaataaaatgatttacataatcgtttctgatgaatatcttctgctcacataaaaatcacacaataactttgagatcgcagattgttttacttttacagcattcgtccccccattgttgggcaaatatagattgggccagagcacgaaagttaataccacgttcgcacagctcctccaacagcacgacaagatgccacatactgcgccccagtcggttcagtttacagactagcagtgctttccctgccgatgatgtcctgagcagttttttcagtccggacctccngccacggttttacgttgaagcggtaaccctgagcacgcagttcttcagtcaggcgtggtgcaccgtaacgctgttattgctgggtgagatcaaaaaactttcaggcagctaaggaaagttgaaccagacaatagatgaaatatttcaaccaattacagcaccaattcagtcactgccagcccaccaaataaatcaaggggttacatgaaaacgtagcccctttttctttggtagtgacactaaaatggatgtagtgtgaagaataatcccgtttactcaatcaataatacatattgtttcaatctacgttattatctctttataaaaattgccatttatttatcattgaaaactgcttttagaactttatacaagaggactattcacaacaggactattctcaatgggagcatcctcaggggagttatcatcaaagtcatcatccataaataaaatatcatcgaatggtgccacacccgtgatcatttttatttttttattacgatcagataagactccatttaaaccgttttcgcttacaggttttaatgatttttcataactctcatggttagcaggcgtattaaaaatacacggagtatcaacatcaaacaatgacattccccagttcacatattgaatatcatagttactgaagttctgtccagaaaagaagcatcccttaaaatccaatccacgtagattatataagccaccctcttctttttggagagtaatgttaattttggctatctcccggacatcatcgccatttttgtatttgaataccgtttcaagatgttctccagacagcttgacttctggaaataatttgaaatcaaagcctacattattatgtgtcaacgtagatgaacaaaagatggaaaaagcttgcagtgctgaattatagctatcgattttatcttgaggctgcgctcttggtaaaaacgtatagcaacattcataaaaattaaacagaagctctgaagaccttccatttttatcaaataatatccccttgaactccttcacaaacgcatctgttattttttgaatatctatggggtgttcctctgactctgacaaagatgaaacctcatctattttgttttcatatgaattacgtggttccatacagacatttggtggcatttctaaaataacaccattcatactacctggcttaagtgaaccaacatgaaaatcactttttattacattatcgaaaagggtttgttcatttcttttagaccattcaactaattgctcaatctcacctttattcgctgatttatgaacttcagaagccacattttccttgatctccggttttaatttaatgagaagattttcccagacctgcttgcttaaacatactacgtcaggctcaccatcagtaactaacacttcattattatcaaagtgtacgttgaatacctttaagttattttcatcaacatcatatttaatacgttttaattgttccccagctcccataatgacaaaggcgttgccttcttgatatatacattcagacattattttttgtaaaatttcaagagcaccgcgatacgtctctgatgcagcttccttacaaattaattttacaatactatgagctagtagctccatgtgtttagaagatttattttcattataacttccactaccccaaactgcgctagcgttaaatccgttgcttttattaattaacattttctattcctcagttaatgtctacatggctatttttaatgttattattgtttgtcactataaaaaatcgctcatttgagacaattgctgacattaactgcttcacttgctacgcatggaacttttaattaaattagcacaggaatgttaaatttaataaacaaaaggttatttcgctgtatgataaaaaccacccgttataatttattagtgaaaatcgtttttcgagtgttagaaatttatatctaaatagcgttgattaatgagcatagccacgctcctgtaacgctcacaaaactcatctacctgcggcgggtgttctagtcagtagtagatgtttaaggcgtggcagagacatttcatccttactctacggcattgttctacatacattggttgtggtactcccttatcatcagtgagcgaacagagaatagttcagtgatttgagtaattaacctgattaaatgaatgggtataataaatgataatacgctggctttatcgttaattacttaattccacatgtaagcaatttgcccgcttggcanagcnggcattttttccaaatacttttgaatgagtactgatagataaatacattgcagtggcgtgccacgtaccaaaacaccagccctcattcgaaaccacccaccgcacttcttccttgaaatggcgttaatcgtgaaatatagaccgccatcgagtaacccttgtacccttaactcttcctgatacatgaatgatgatttggtggcccttgctggacttgaaccagcgaccggacgattatgagtcgcctgctctaaccactgagctaaagggccttaagtatgcaataacaatacttataacccacgcaataaacatgatgatcttatgatgtaaatcacagatttttatgcgttctcatccatcctgggtcgtcaatacatgcgacataaaacccgacaccacctccattccgcaaagtcgatactcgcagtcaacaagcaaatgttaataattagcacaatctatagttatcatcgattcaatgatactttgtaatgattttgtatctaataanataagtttattacattaactgaagagttttcgcatcattatgatatctgttacttttcactccataaaaataaacttcatatagcnnnntattcttttatagaacttattctgctaataattagtttcgtatgagcgatttttgacagttgcctctccagaccacatcgataattaaaaaaacagatttaagcattatccttttccatataaatattggataaaaataggacatctgtttgcaattactttcacaacaattaaacatttttatgtttccgtatacatcatattactctaccattagaggaacgttattatgttttctataaaaccaggaccaagaaaattacctatcgacaacccctcattgttatcatggaacattactgacggggatctaaattccaaattaaatacattagaatatctaaactgtgtaacaaatattattaatgcttgtggagtttatcctcaggatttaaaagacagagaaattatatcaacttttcacgcagaaaaagtcattaatgatctgttaaaaaacgattataaaatttccctttctccagatacaacttaccgagagctgaataaagctgcacagcgtagcattacagcgccagacaggataggagaagggaaaatatgggtttatcaacgagatacaatggttgaaagaggtgataacagcggtgttcatcagtatggtccagctgaacatttcactcacattatatctgacaaaccgtccccaaaagataagtatgttgcatatgctattaacattcctgactatgagctagcagccgatgtatataatatnaacgtgacgtcaccttccggacagcaagaannnnttaaaatattaatcaatccagaacatctacggcaaacacttgagcgtaaatcccttactgctgttcagaaatcacaatgtgaaatcatcacccccaaaaaacctggcgaagcgattcttcatgcttttaatgccacctaccagcaaatcagggaaaatatgtctgagtttgcacgttgccattatgggtatatacaaatccctccagtgacaactttccgcgccgacggaccagaaactcccgaagaagaaaaaggttactggtttcacgcttatcaacccgaagatctttgtaccatccataatccaatgggagatttgcaggattttatcgcattggttaaagatgctaaaaaatttggtatcgatatcattcctgattatacctttaactttatgggaatcgggggtagtggtaaaaatgaccttgattatccctctgctgatatacgagcgaagatcagtaaagatatagaaggtggtatccctggctattggcaaggtcaggttttgattccatttactatagatccagtaacaaaagaacgtaaacaaatccatccagaagatatacatctcacagcaaaagacttcgaagcaagtaaagataatatttctaaggatgaatgggaaaacctccatgcattaaaagaaaagcgtttaaatggaatgcctaaaaccccccccaaaagtgaccaggttattatgttgcaaaatcaatacgttcgtgaaatgcgaaaatatggcgtacgaggtttacgttacgatgcagcaaaacactcaaaacatgaacaaatagaaagatcaataaccccaccgcttaaaaattataatgagcgattacacaatactaacttatttaacccaaaatatcatgaaaaagccgttatgaattacatggaatatctggtaacttgccagttggatgaagaacaaatgtcatcgctgctttatgaaagagatgatttaagcgccattgatttttcattgctcatgaagacgataaaagctttttcatttggtggcgatctccaaacccttgcatcaaaaccgggttccacaatctcaagcatcccatcaaaaagacggatattgattaacattaaccacgattttcctaacaatggcaatcttttcaatgactttctatttaaccatcaacaagatgaacaattagcaatggcatatatggccgctctcccgttcagcaggcctttagtttactgggatggccaagtattaaaatcaacgactgaaattaaaaattatgatgggtcgacgcgtgtcggcggtgaggcgtggcttaataaaggttgctctacctatcagcagctctacaatgaattccacgcattatatatagataaagcaggaatatggagcgcatttgagggtgtatttgcaactaaaaacgttctggcctttagtcgtggggattcggtgaacattaatcactctcctcatgatggactagttataataaataaaggaaacgaagaagttgaaggtgcctggcctaacaaattgcaacctggaaaatataaaaacatggggagtaatagcgttaacattnnnnttaataatacccgaaaaattatcccccctggtaaagcatttatgcttagaggcggaactctaaatatcaatattcctgggcgtagcgctcttcttttagggaaaacaggagaaccgctgaactatctctatttgtaatttaatgttatatctgccccgctaaaacggggcagataatatatttagtttactagcggtcattttgcagtgaagccatttaccgttttttatcgaccanataatctgttctctgatagtaatccccccctaacctgttgctttagttattcatttcctgtctcactttgccttaataccctacgttaaatgttaccaatttgttgcttttgatcacaataagaaaacaatatggcgcatttgtgcgcatttttcagaaatgtagatatttttagattatggctacgaaatgagcatcgccatgtcaccctacatctcataagaggatcgcttctgatgaatgcactgaccgccgtacaaaataacgctgtcgattcaggccaggactatagcggattcactctcatcccgtcggcgcaatccccgcgtctgctggaactcaccttcaccgaacagacgaccaaacagtttctcgaacaggttgccgaatggcccgtgcaggcgctggagtacaaatcgtttctgcgttttcgggtaggtaaaattcttgacgatctgtgtgcgaaccagctgcaaccattgctgttgaagaccctgctaaaccgtgctgaaggtgcgctgttgatcaatgcggtgggtgtcgatgatgtgaagcaagcggatgagatggtgaagctggcgacggcggtggcgcatctgattggccgttccaatttcgatgcgatgagcggtcagtattacncncgttttgtagtgaaaaatgtcgataactcagacagctatctgcgtcagccgcaccgcgtaatggagctgcacaacgacggcacntacgtcgaagagatcactgactatgtgctgatgatgaaaatcgacgagcagaacatgcagggtggaaattcgttgctgctgcatctcgatgactgggaacatctggaccactatttccgccatccaatggcgcgtcgcccgatgcgctttgccgcgccgnnnngcaaaaacgtcagcaaagatgttttccatccagtgttcgacgttgatcaacagggtcgcccggtgatgcgctatatcgaccagttcgtccagccaaaagacttcgaagaaggcgtgtggttgagcgagctttcggacgccattgaaatcagtaaaggcattctttctgtacccgttcccgttggcaaattcctgttgattaacaacctgttctggctgcacggtcgcgaccgctttactccgcacccggatctgcgccgtgaactgatgcgtcagcgtggctatttcgcttacgccactcaccactatcagacgcatcagtaagcgcaaaggaattgagcggatgtatgattttgtgattattggcggcggcatcatcggcatgtcgaccgccatgcaantgattgatgtctatccggatgcccgcattgcgttgctggaaaaagagtccggcccggcctgtcatcagacgggccacaacagcggcgtgatccatgccggggtttattacacgcccggtagcctgaaggcgcagttttgcctggcgggaaaccgcgccactaaagccttttgcgatcaaaacggcattcgctatgacaactgcggcaagatgctggtcgccacctctgaactcgaaatggaacggatgcgcgcgttgtgggaacgcacggcggcaaacggtatcgagcgcgagtggttaaacgccgatgaactgcgcgagcgcgaaccgaatatcaccgggcttggcggtatttttgtgccgtccagcggcattgtcagctaccgcgaagtcacggcggcgatggcaaaaattttccaggccagaggcggcgagattatctataacgccgaagtcagcggccttagtgagcataaaagcggcgtggtgatacgtacccgtcagggcagcgactatgaagcatcgacgctgattagctgttccgggctgatggctgaccggctggtgaaaatgntcggcctcgaaccgggctttattatctgcccgttccgnggcgagtatttccgcctggcgccggagcataaccagattgttaaccatctgatttaccccattcccgacccggcaatgccgtttttgggcgtgcatctcacccgcatgatcgacggcagcgtcaccgtcgggccaaacgcggtgctggctttcaaacgcgaaggctatcgcaagcgcgacttctcatttagcgacacgctgganattttgggctcgtcggggattcgccgggtgctgcaaaaccatctacgctcaggactgggcgagatgaaaaactcgctgtgcaaaaccggctatctgcggctggtgcaaaagtattgtccccggctttcgttaagcgatctccagccctggcccgccggtgtgcgggcgcaggcggtatcgccggacggcaagctgattgacgattttctgtttgtcaccaccccgcgcacgatccacacctgcaatgcgccctccccggcagcgacatcagcaattcctattggtgcgcatattgtcagcaaggtacaaacgctgttggcaagccagagtaaccccggacgcacgctgcgagcggcacgtagtgtggatgccttacacgccgcgtttaatcaataacctttgaaaacaggatgtagcgatgaaactgaacgacagtaacttattccgccagcaggcgttgattaacggggaatggctggacgccaacaatggtgaagtcatcgacgtcaccaatccggcgaacggcgacaagctgggtagcgtgccgaaaatgggcgctgatgaaactcgcgccgctatcgacgccgccaaccgcgccctgcccgtctggcgtgcgctcaccgccaaagaacgcgccaacattctgcgcaactggttcaatttgatgatggagcatcaggacgatttagcgcgcctgatgaccctcgaacagggtaaaccgctggctgaagcgaaaggcgaaatcagctacgccgcctcttttattgagtggtttgccgaagaaggcaaacgcatttatggcgacaccattcccggtcatcaggccgataagcgcctgattgtgatcaagcagccgattggcgttacagcggccatcacgccgtggaactttccggcggcaatgattacccgcaaagccggtccggcgctggcggcaggctgcaccatggtgctgaagcccgccagtcagacgccgttctctgcgctggcgctggcggagctggcgatccgcgcgggcattccggctggcgtgtttaacgtggtcaccggttcggcgggcgcggtgggtaatgaactgaccagcaacccgctggtacgcaaactgtcgtttaccggctcgaccgaaattggccgccagttaatggaacagtgcgcgaaagacatcaaaaaagtgtcgctggagctgggcggcaacgcgccgtttatcgtctttgacgatgccgatctcgataaagccgtagaaggcgcactggcctcgaaattccgcaacgccgggcaaacctgcgtctgcgccaaccgtttatacgtgcaggacggcgtgtatgaccgctttgccgaaaaattgcagcaggcggtgagcaaactgcatatcggcgacgggctggataaaggcgtcaccatcgggccgctgatcgatgaaaaagcggtagcaaaagtggaagagcatattgccgatgcgctggaaaaaggcgcgcgcgtagtttgcggcggtaaagcacatgaacgcggcggcaacttcttccagcccaccattctggtggacgtgccggccaacgccaaagtgtcgaaagaagagaccttcggccccctcgccccgctgttccgttttaaagatgaagccgatgtgatcgcgcaagccaatgacaccgagtttggccttgccgcctatttntatgcccgtgatttaagtcgcgtcttccgcgtgggcgaggcgctggagtacggcatcgtcggcatcaataccgggattatttccaatgaagtggccccgttcggcggcattaaagcctcgggtctgggtcgtgaaggttcgaagtatggcatcgaagattacttagaaatcaaatatatgtgcatcggtctttaactggagaacgcgaatgagcagcantaaagagttaatgcagcgccgcagtnaggcaattcctcgtggcgttgggcaaattcaccccattttcgctgatcgcgcggaaaactgccgggtgtgggacgttgaaggccgtgagtatcttgatttcgcgggcggcattgcggtgctcaataccgggcacctgcatccgaaagtggttgccgcggtggaagcgcagttgaaaaaactgtcgcacacctgcttccaggtgctggcttacgagccgtatctggagctgtgcgagattatgaatcagaaggtgccgggcgattttgccaagaaaacgctgctggttacgaccggttccgaagcggtggaaaacgcggtgaaaatcgcccgcgctgccaccaaacgtagcggcaccatcgcttttagcggcgcgtatcacgggcgcacgcattacacgctggcgctgaccggcaaggtgaatccgtactctgcgggcatgggcctgatgccagggcacgtttatcgcgcgctttatccttgcccactgcacggcatcagtgaagatgatgctatcgccagtatccaccgaatttttaaaaatgatgctgcgccggaagatatcgccgccatcgtgattgagccggttcagggcgaaggcggtttctacgccgcgacgcctgcgtttatgcagcgtttacgcgcgctgtgtgacgagcacgggatcatgctgattgccgatgaagtgcagancggcgcggggcgtaccggcacgctgtttgcgatggagcaaatgggcgtggcaccagatctcaccacctttgcgaaatcgatcgcaggcggcttcccactggcgggcgtcaccgggcgcgccgaagtgatggatgccgtcgctccaggcgggctgggtggcacctatgccggtaatccgattgcctgcgtggcggcgctggaagtgttgaaggtgttcgagcaggaaaatctgctgcagaaagccaacgatctggggcagaagttgaaagatggattgttggcgatcgccgaaaaacaccctgagatcggcgacgtacgcgggctgggggcgatgatcgccatcgagctgtttgaagacggcgatcacaacaagccggacgccaaactcaccgccgagatcgtggctcgcgcccgcgataaaggcctgattcttctctcctgcggcccgtattacaacgtgctgcgcatccttgtaccgctcaccattgaagacgctcagatccgtcagggtctggagatcatcagccagtgttttgctgaggcaaagcagtagcgccgctcctatgccggaggcgacgctgcgcgtcttgtccggcctacggggatccaggtcggataaggcgtttacgccgcatccgacaatctgtacgtgaacaggaataaatctatgttggccgggtaaggcggagccgctctccggcaaaaagaatcaataacaattatacgcgtgacccgacgcgggaaatgtcggggcgctctcccaagtgacacactttcgagaggattcaggatggggcaatcatcgcaaccacatgagttaggcggcgggctgaagtcacgccatgtcaccatgttgtctattgccggtgttatcggcgcaagtctgtttgtcggttccagcgtcgccatcgccgaagcg

SEQ ID NO: 1451 - DNA, 2446 bp, Escherichia coli
  Strain O55:H7
  modified_base (621)..(621): a, c, g or t
  modified_base (896)..(896): a, c, g or t
  modified_base (1873)..(1873): a, c, g or t
  modified_base (2307)..(2307): a, c, g or t
  modified_base (2324)..(2324): a, c, g or t
gtattactggcctatctgttcgccgggctactggtggttatgattatgcggatgttggcggaaatggcggttgccacgcccgataccggttcgttttccacctatgccgataaagctattggtcgttgggcgggttataccatcggctggttgtactggtggttttgggtactggttatcccgctggaagccaacatcgccgccatgatcctgcactcatgggttccaggcattcccatctggttattttccctcgtcattacccttgccttaactggcagtaatttattaagcgttaaaaactacggcgaatttgagttctggctggcgctgtgcaaagtcatcgctatcctggcctttattttccttggtgcagtcgcaattagcggtttttacccgtatgccgacgtgagcgggatctcaagattgtgggatagcggcggctttatgcccaacggcttcggtgcggtattaagcgcgatgttgatcaccatgttctcgtttatgggcgcagaaattgtcaccattgccgccgcggaatccgacacgccggaaaaacatattgtccgcgctaccaactcggttatctggcgtatttctatcttctatttgtgctctatntttgtcgtagtggcgttaataccgtggaatatgccggggctgaaagccgttggatcttatcgctcggttctggaattgctcaatataccccatgcgaaattaatcatggactgcgtgatattactttccgtaaccagttgcctgaactcggcgctgtataccgcgtcaaggatgctctactccttaagccgtcgcggtgatgcgcccgcggtaatgggcaaaatcaaccgcagtaaaaccccgtatgtggcggtgttactctccaccggagcggnatttttaacggtcgtggtgaactattacgcacctgcgaaagtgtttaaattcctgatcgacagctccggtgctatcgccctgctggtttatttagtcatcgccgtttcacagttgcggatgcgtaaaattctgcgagcagaaggaagcgaaattcgcttgcgcatgtggctttacccgtggctcacctggctggtaatcggctttattacctttgtgttggtggtgatgttattccgcccggcgcaacagttagaagtgatctctaccggcttattagcgatagggattatctgtaccgtgccgattatggcgcgctggaaaaagctggtattgtggcaaaaaacacccgttcataatacgcgctgataatgatcaggagtcacaccatgaccattacgtctctggatggctatcgctggctgaagaacgatattattcgcggtaattttcaaccggatgaaaaattacgaatgagtttgctgacatcgcgttatgcacttggcgttgggccgttacgggaagctctttcgcaactggtggcggaacggctggtcacggtggtgaatcaaaaagggtatcgggtggcgtctatgtcagagcaggagctgctcgatattttcgacgcccgcgccaatatggaagcgatgttagtgagtctggcgattgcccgcggtggcgatgagtgggaggcagacgttctcgcaaaagcgcatctgctgagtaagcttgaggcctgtgacgccagcgagaaaatgcttgatgagtgggatctgcgtcatcaggcgtttcatactgcaattgtggcgggctgtggttctcactatttgctgcaaatgcgtgaacggttgtttgatctggcggcgcgttatcgatttatctggctgcggcgaacggtgctttcggtggaaatgctggaggataaacacgatcagcaccagaccctgactgcggcggtactggcgcgagataccgcgcncgccagtgagttaatgcgccagcatttactgacgccaattcccattatccagcaggcgatggctggcaattaactactcttccggaatacgcaacacttgccccggataaattttatccgggctttttagcatcggtttattcgcttcgaagattttattgtacagattagcgttaccgtagacctgtttggaaatggcactcagagtgtcgccagacttaacggtataaaactggctggcagtggctggtgtcgccgttttcacctgatcatcaacactggcaataccggaaatattccccaccgcaacaaggattttctccttcgcctcctgactcaggccgtcaccagtgaccgtcgctttgccatcggcaatttgaatgttcactttatcggcatcaggtataccggttttgctcagatgctcctgcacnttcttcgcctgatcatntttatcgtgctgacctgtaaccgcgtcccagagtttttctccggcatctttcacaaaattgaacagccccatagctacctcattcgttaacggaaacactcagaaagtgtagcagaggaacg

SEQ ID NO: 1452 - DNA, 230 bp, Escherichia coli
  Strain O55:H7
acgccgcggggatgagcacaggtttaatcgcgggtttgcacccagaacgcgtgaatcaaaccggggatatacccaagcagtgtcaacagaatattaataatgaacgcccaaccgaaccctttaccgagcagcacgccgagcggcggcagaatgatggtgatgacgattctccagaaacccatatgtactccctataagaaaattactcattgtttaaaaagagattttat

SEQ ID NO: 1453 - DNA, 17957 bp, Escherichia coli
  Strain O55:H7
  modified_base (2530)..(2530): a, c, g or t
  modified_base (2967)..(2967): a, c, g or t
  modified_base (3509)..(3509): a, c, g or t
  modified_base (3537)..(3537): a, c, g or t
  modified_base (4352)..(4352): a, c, g or t
  modified_base (4480)..(4480): a, c, g or t
  modified_base (5918)..(5919): a, c, g or t
  modified_base (10854)..(10854): a, c, g or t
  modified_base (12062)..(12062): a, c, g or t
  modified_base (12151)..(12151): a, c, g or t
  modified_base (12240)..(12240): a, c, g or t
  modified_base (12255)..(12255): a, c, g or t
  modified_base (12319)..(12319): a, c, g or t
  modified_base (13872)..(13872): a, c, g or t
  modified_base (15231)..(15231): a, c, g or t
  modified_base (15509)..(15509): a, c, g or t
  modified_base (15734)..(15734): a, c, g or t
  modified_base (17948)..(17951): a, c, g or t
tagcggaggctgccagtttcagcttacgcttttactctcatttacgctgctgaggctggtatatgttgcatttttagtttagagtttacttaatttagaaaatacttaaataactatgaccgaactcacgcaattacaggccagtgctgaacaggcagcggccttattgaaagcaatgagccaccctaaacggttgctgattctgtgcatgcttagcggttcccccggcaccagcgcgggagagctgacgcgcattaccggactgagcgcctctgcgacatcacagcatctcgctcgtatgcgggacgaagggcttatcaacagccaacgggatgcccaacgcattctatattccattaaaaatgaggcggtaaatgccattatcgccaccctgaaaaatgtctattgtccgtaaggagtcactatggctttgacaaccatttcgccgcatgatgcacaagaattaatcgcacgcggcgcaaagttaatcgatattcgtgacgctgatgaatatcttcgtgaacatattcctgaagcagatctggctccattatccgtgctggaacagtcaggtctcccggctaaattacgtcgcgagcaaattatattccactgccaggcaggtaaacgcaccagtaataacgccgataaattagcagcgattgccgcccccgcagaaatctttttactcgaagatgggattgatggctggaaaaaagcaggattaccagtagcggtaaataaatctcaacccttgccgttaatgcgccaggtgcagatcgctgcgggtggtttaatattaatcggcgttatactgggttataccgtaaatagcggtttcttcttattaagcggctttgttggtgccgggttactgtttgcaggaattagcggtttttgtgggatggcaaggttgttagataagatgccgtggaaccaatgagcttgagaagcgacgccggacgcgccctagcagcgacatccggcctcagtaattagatcaggaaatcgtcgagagatttaccttctgccagcgcctgagcgattggcttcggtgtacggccctgaccggtccaggttttagtttcaccgttaacatcggtgaatttatatttcgccggacgcggctggcgttttttaccagcacgtggtgcagcagcagagctattacccaataactcttccgggttaattccgtcagctttcatcagctccagccaggtgctaattttttcctggcgctctgccagttcacgctgctgctgttcttcttcttcacgtctttctttagtgacaaccctgaatttttcgagcatttcttcaagaacgtcaatggagaattcgcgagccatcgcacggagggtgcgaatgttatttaaactttgtaacattacggacataataaagaaaaccttttaacgccaaaacaaaaaagtatttcgtcgcgtagtgtaagcgatcacttattatatttccacaaaatttaatctatttacagtcctgcgcgagattatttcagctgttattttctgaaactctcagaataatttcaagattatatattagccattttgatgagtaatttagattattggtgaacagaacggcgctctctgctcgctaattccgcaagcctgacaaaaccaaagtgaataaaaatgcaatataacagaataaaataaaacacccctcactggtgctttctgctgttaatgtacattttctggcataaaaaatgctgtaaatgacccggtcacgacatacaccgaattctctacgcttatagcgttacctcacccccaaactttcattagtgaaattaaaggaaaggtcatatcaaattgatttaattgaaaataaatcatatcggcatgtaaaaacccacaatgcacaaaaaacgagccgttacggaatattttatctacaaaaactgactaaataaaaatttttcactaattgattagtcatagccagcgatatacgctatgcgaaaatgcagatggtaatgagatccactgctttcatctccattaacatcccattacgcttttattaaggagcattagcatgttctcaccgcagtcacgcttgcgtcatgcagttgcagatacgttcgcgatggttgtttactgttctgtcgtgaacatgtgtattgaagttttcctctccggaatgagcttcgaacagtctttttattccagattggtagcgattccggtgaacatcttaattgcatggccatacggtatgtaccgcgatctgtttatgcgcgcggcacgcaaagttagcccgtcgggctggataaaaaatctggcggatatcctggcttatgtgacgttccagtcaccggtgtatgtggcgatcttgttagtggtgggcgcagactggcatcagattatggcggcggtcagttcaaacatcgttgtttcgatgttgatgggggcggtttatggctacttcctcgattattgccgccgactgtttaaagtcagccgttaccagcaggtaaaagcctgactcttcttttcgngactggcatcgccagtcgcgtctttaactggcttcgccaaataaaccattcaaataacgttcaagcgcaacacgcgaactaaagccatgcgggataccgtaatgctcgtgtcgctcgcctgctaaatagagcggaaattgctggtaatgatcgcaagttttaatatcggaagcgggttcagccagtgtcgaactgcgttcttttaatgttggatgaattaccagagcggtacgtcccattcgcgcttcgcgattaacatagacataattttccccacggcggtaaccatacgctttctgggttaccacatcgacagtaaaaccgactttttcaagtacgcgcgccacctcgtctggtcgtaaatacatatttgatcctcgttattatcaaccgcgggcctaccttacctgattgcgcattcacaacgctttcagaanagtccataaagccgcgatgaacctcagttaagaaaattatggtctacactgaaaattacatcgaattctaatgggggatcatatgtttaaccgaccgaaccgcaacgacgttgatgatggcgtgcaggatatccagaatgatgtcaatcaattagctgacagcctcgaatctgtattgaagtcctggggcagcgacgccaaaggggaagctgaagccgcacgcagtaaagctcaggcattgctgaaagaaaccagggcgcgaatgcatggtcgtactcgcgtccagcaagccgcgcgcgatgccgtaggctgcgcggattcttttgttcgtgaaagaccctggtgtagtgtgggaactgctgctgtggtaggtatttttatcggtgcgttgttgagcatgcgtaaatcgtagtgagacgatgacaagcagtagtctgacttctgaaaagtactcagtgcgtcaacgccttgtccgcctacaggcctgaaaaacatagcgcatcaggggtttttgccctggtcaccagtcttataggaccccnaagcctggcttcggggttattaatttanagcactgcgcaattgctgtgctacctgtcgcgccatactttcgctaacgatattcgtaaacgagagcaataatcctccgtcctcgcttgagcggatacgccagtcgctaagtgcctgtacggcaagaccagcagcattggctttatgcacgaatgtcacgtcattacctgctagtttgatcaccatctggataccgcctttttgcggcacaacctgaaatccctgctgcgtaagtgcctgctcaatccactgccgtcgctgggcataatgctggcgcattttcttcagatgccgccagaaatgcccctcacggatgaaatctgccagtgtgttctgccacagtacgggtacagcacatggttccagtgacgcctgctgccggaattgcgaaatctgctccaccggcaccaccagccacgcacagcgcaatgcaggaaatagcgctttgctgaatgttccggcataaatcacccgctgcggcgcgtcgagactttttagtgccggtaacggcttaccgtgatagcgaaactcactgtcgtaatcatcttcaataatccatgcctgactacgctctgcccattccagtatctgatacctacgcgctaaagagagtgccacacccagcgggctttggtgtgccggagtaatcagggcaaaacgcgcatcaggataattttgtattccgcttgtgacatccagtccgttgtcatcaaccggcacaggtaaaatttccacaccgtggcgagtgacaatcgggcgaatcagcggaaagccgggatcttccatccacatcccgtctcccggttgcgccagancgtgcagaattaaagccattgaggccgcataaccgtgagtgataaagacctgctctggctgacaatcaatcccacgtgaaacgcgtaaataatcaacaatagcctcgcgcaaggccgcctcgccgcanacatcgcctaatgccaaatcaaagcgcgtctgggtacgcagacggcggcccatcacccgcgcccacaattcacgcggaaaaagatcaagtgcaggtagccccatctgaaaaggcagcggctgctgactttcaccagcaaaagccacgacatccacagcagactgttgcggatgtatctgctcactgacaaaggtacccgcctgtccccgcctgaccagccatccctgcgccaccagctcagcataagcattttcgacagtggatcgagagacacccagctcctgcgaccaggtacggctcgaaggtagccttgcgccaggtttcagttttccttgctcgataaccgtttttaactgacgggcgatatcctgataacgtggcatatggtctgcttttttaggtaatttatggctctctttagcagtccattatagtgctacattgcgggcgttaataagaggagaaactgtatgactacattacgtcagccttactacgaacttagcccggcagtgtataacgcactggtgcaggccaaaacggcactggaaaatagcacgctggataccacgttgatggagttaatttatttgcgcgtctcgcaaatcaacggctgcgcattttgtctggagatgcacagcaaagcattgcgcaaatccggtgtgccacaacacaaactggacgccctggcaggctggcgcgtaagccatcattttgatgaacgcgagcgagcggcgctggcatgggcggaatctgtgaccgatattgccagaacccatgcggaagacgaggtttatcagcctttgcttgagcatttcagcgcagcagaaatcagcgacttaacgtttgccatcgggctgatgaattgttttaaccgtctggccgtttccatgcggatgtaatttgctgttgccgggtatgcgcccggcaaaaaaacacaaaatctcctaccccgttgagccattcaccggtggcgtaatcaatctaaaattaccatatcttgtgtggttgaatcttttttcaactacatctagtatctctgtatcaacagagagacaacccgacgcgtatcatcgcgccgtatcttcattttaaacggaaatacgaatcatgcgcattactatttacactcgtaacgattgcgttcagtgccacgccaccaaacgggcgatggaaaaccggggctttgattttgaaatgattaatgtcgatcgcgttcctgaagcggcagaagcgttgcgtgctcagggctttcgtcagttgccggtagtgattgctggcgatcttagctggtctggtttccgtccggacatgattaaccgtctgcatccagcgccacacgcggccagtgcatgagccagctcgtctacttctccagcagctccgaaaacacgcagcgttttatcgaacgtttaggtctgcccgcggtgcgcatccnnctcaatgagcgggaacggattcaggtagacgagccttacatcctgatcgtgccctcttacggcggcggcggtacggctggcgcggtgccacgacaggtaattcgctttttaaacgacgagcacaaccgggcgttgcttcgcggcgttattgcttcgggtaatcgcaactttggtgaggcgtatggccgcgccggagatgtgattgcccggaaatgcggcgtgccgtggctgtaccgttttgaactcatgggtacgcaaagcgatatcgaaaacgttcgtaaaggagtaaccgaattttggcaacgacaaccgcagaatgcctgacgcagaaaacgatggattaccacgcgctgaatgcgatgcttaacctctacgatagcgcaggtcgcattcagttcgataaagaccgccaggccgttgacgcctttatggcgacgcatgtgcgtccgaacagtgtgaccttcagtagccagcagcagcgcctgaactggctggtcaacgaaggttactatgatgaaagcgttcttaatcgctactctcgcgactttgtcattacgctgtttgcccacgcacacaccagcggttttcgtttccagacattcctcggggcatggaagttttacaccagctatacgttgaagacattcgacggtaaacgttatctggaagattttgccgatcgagtcacgatggtggcgctgacgctggcacaaggcgatgagacgctggcgttgcaactgacagatgaaatgctgtcaggacgctttcagccagccacgccaacattcctcaactgcggtaagcagcagcgcggcgaactggtttcctgttttttgctgcgtattgaagacaatatggagtcgattggtcgggcggtaaattccgcactgcaactgtcgaaacgcggcggcggcgtagcatttttgctgtcgaatctgcgggaagcgggcgcgccaattaaacgtattgaaaatcaatcttctggcgtaattccggtgatgaaaatgctggaagacgcattttcctatgccaaccaactcggcgctcgtcagggggctggtgcagtctatttacatgctcatcatcccgatattctgcgttttctcgacacgaaacgggaaaatgccgacgaaaaaatccgcattaaaacactgtcgcttggcgtggtgatcccggatatcactttccatctggcaaaagagaatgcgcagatggcgctgttttcgccttatgacgtagagcgagtttatggcaagccgtttgccgatgtggccatcagccaacactatgacgaactggttgccgatgaacgcattcgcaaaaaatacctcaacgcccgtgatttcttccagcgactggcagaaatccagtttgagtccggctatccctacatcatgtatgaagacacggtaaaccgtgctaaccctgtcgccgggcgcataaatatgagtaatctctgctcagaaattttgcaggttaacagcgcctcagagtatgacgagaatctcgactatgcccgcacaggccatgatatctcctgcaatttaggttcgttgaatattgcgcacaccatggattcccccgattttgcccgcacggtagagactgccgtgcgcggtttaacggcagtatcagatatgagtcatatccgcagcgtgccgtccatcgaagccggaaatgccgcctcgcacgccatcggactggggcagatgaatttacacggctatctggcgcgagaaggcatcgcttatggttcgccggaagcactggatttcaccaatctctatttctatgccatcacctggcacgcactgcgtacctcgatgttgctggcacgcgaacgcggtgaaaccttcgccgggttcaaacagtcacgctatgccagtggtgaatattttagccaatatctgcaagggaactggcagccgaaaacggggaaagttggcgaactgtttgcccgtagcggtattacgttacctacccgtgagatgtgggcgcaactgcgcgacgacgtgatgcgctacggcatttacaaccagaatcttcaggcggtgccgccaacaggttctatctcttatatcaaccatgctacgtcgagtattcatccgattgtggcgaaagtagagatacgcaaagagggcaaaacaggacgcgtttactaccctgccccgtttatgactaacgagaatctggcgctgtatcaggacgcttacgaaattggcgcagaaaagatcatcgacacctacgcggaagcgactcgccatgtcgatcaggggctgtcactgacgctgtttttccccgataccgccaccactcgcgatatcaacaaagcgcagatttacgcctggcgcaaaggtatcaaaacgctctattacatccggctgcgtcagatggcgctggaaggcactgaaattgaaggctgcgtctcctgtgcactttaaggaatatctatgaaactctcacgtatcagcgccatcaactggaacaagatatctgacgataaagatctggaggtgtggaatcgcctgaccagcaatttctggctaccagaaaaggtgccgctgtcgaacgatattcctgcctggcagacattaactgtcgtagaacaacaactgacgatgcgcgtttttactggcctgacgctgctcgacacgctgcaaaatgttatcggcgcgccttcgctgatgcccgatgcactcacgcctcatgaagaagcggtattatcgaatatcagctttatggaagcggttcatgcccgctcttacagttcgattttctcgacgctgtgccagaccaaagatgtcgatgccgcctacgcctggagtgaagaaaacgcgccgttgcagcgaaaagcacagattattcagcaacattaccgcggtgatgatccgctgaaaaagaaaatcgccagtgtgtttcttgaatcttttttgttctattccggtttctggctgccgatgtatttttccagccgcggaaagctgaccaataccgcggacctgatccgtctgattatccgcgatgaagcagtccacggttactacataggctataaatatcagaaaaacatggaaaagatatctctgggacaacgtgaagagttgaagagtttcgccttcgatttgttgctggaactctacgacaacgagttgcaatacaccgatgagctgtacgccgaaaccccgtgggctgacgatgtgaaagcgtttctctgttacaacgccaataaggctttgatgaatctgggctacgaaccgttatttcccgcagaaatggcggaagtgaatccggcaatcctcgccgcgctttcgccgaatgccgatgaaaatcacgatttcttttccggttcaggctcctcttatgtgatggggaaagcggttgaaacagaagatgaagactggaatttctgagggtgttattttcaaaaatatcactacccgcgacagggaaataattcccgccaaatagctttttatcacgcaaatattttgtggtgatctacactgatactctgttgcattattcgcctgaaaccacaatattcaggcgttttttcgctatctttgacaaaaaatatcaacttttctcgatttgctctcagcccttatatcacgggaaattccggcgatttgctcgcatcaatattcatgccacatttgccatcaggggttgcctcagattctcagtatgttagggtagaaaaaagtgactatttccattgggtaatatatcgacataaacaaataacaggaatctttctattgcatggcaattaaattagaaattaaaaatctttataaaatatttggtgagcatccacagcgagcgttcaaatatatcgaacaaggactttcaaaagaacaaattctggaaaaaactgggctatcgcttggcgtaaaagacgccagtctggccattgaagaaggcgagatatttgtcatcatgggattatccggctcgggtaaatccacaatggtacgccttctcaatcgcctgattgaacccacccgcgggcaagtactgattgatggtgtggatattgccaaaatatccgacgccgaactccgtgaggtgcgcagaaaaaagattgcgatggtcttccagtcctttgccttaatgccgcatatgaccgtgctggacaatactgcgtttggtatggaattggccggaattaatgccgaagaacgccgggaaaaagcccttgatgcactgcgtcaggtcgggctggaaaattatgcccacagctacccggatgaactctctggcgggatgcgtcaacgtgtgggattagcccgcgcgttagcgattaatccggatattttattaatggatgaagccttctcggcgctcgatccattaattcgcaccgagatgcaggatgagctggtaaaattacaggcgaaacatcagcgcaccattgtctttatttcccacgatctcgatgaagccatgcgtattggcgaccgaattgccattatgcaaaatggtgaagtggtacaggtcggcacaccggatgaaattctcaataatccggcgaatgattatgtccgtaccttcttccgtggcgttgatattagtcaggtattcagtgcgaaagatattgcccgccggacaccgaatggcttaattcgtaaaacccctggcttcggcccacgttcggcactgaaattattgcaggatgaagatcgtgaatatggctacgttatcgaacgcggtaataagtttgtcggcgcagtctccatcgattcgcttaaaaccgcgttaacgcagcagcaaggtcttgatgcggcgctgattgatgcgccgttagcagtcgatgcacaaacgcctcttagcgagttgctctctcatgtcggacaggctccctgtgcggtgcccgtggtcgacgaggaccaacagtatgtcggcatcatttcgaaaggaatgctgctgcgngctttagatcgtgagggggtaaataatggctgatcaaaataatccgtgggataccacgccagcggcggacagtgccgcgcaatccgcagacgcctggggtacaccggcgactgcaccgactgacggcggtggtgctgactggctgaccagtacgcctgcgccaaacgtcgagcattttaatattctcgatccgttccataaaacgctgatcccgctcgacagttgggtcactgaagggatcgactgggtcgttacccatttccgtcccgtcttccagggcgtgcgcgttccggttgattatatcctcaacggtttccagcaattgctgctgggtatgcccgcaccggtggcgattatcgttttcgctctcatcgcctggcagatttccggggtcggaatgggcgtggcgacgctggtttcgctgattgccatcggcgcaatcggtgcctggtcgcaggcaatggttactctggcgctggtgttaaccgccctgctgttctgtatcgtcatcggtttgccgttggggatctggctggcgagaagtccgcgagcggcgaaaattattcgtccactgcttgatgccatgcagaccacgccagcgtttgtttatctggtgccaatcgtcatgctatttggtatcggtaacgtgccgggcgtggtggtgacgatcatctttgctctgccgccgattatccgtctgaccattctggggattaaccaggttccggcggatctgattgaagcctcgcgctcattcggtgccagcccgcgccagatgctgttcaaagttcagttaccgctggcgatgccgaccattatggcgggcgttaaccagacgctgatgctggccctttctatggtggtcatcgcctcgatgattgccgtcggcgggttgggtcagatggtacttcgtggtatcggtcgtctggatatggggcttgccaccgttggcggcgtcgggattgtgatcctcgccattatcctcgatcgtctgacgcaggccgttgggcgcgactcacgcagtcgcggcaaccgtcgctggtacaccactggccctgtcggtctgctgacccgcccattcattaagtaactctgcacttgcccggtgacgccgggcatatcaccctgccaaaaaaaggaataacaatgcgacatagcgtactttttgcgacagcgtttgccacgcttatctctacacaaacttttgntgccgacctgccgggcaaaggcattactgttaatccggttcagagcaccatcaccgaagaaactttccagacgctgctggtcagccgcncgctggagaaattaggttataccgtcaataaacccagcgaagtggattacaacgttggctacacctcgcttgcttccggcgatgcaacnttcaccgccgtgaantggacgccactgcatgacaacatgtacgaagctgccggtggcgataagaaattttatcgtgaangggtatttgttaacggcgcggcacagggttacctgatcgataagaaaaccgccgaccagtacaaaatcaccaacatcgcacaactgaaagatccgaagatcgccaaactgttcgataccaacggcgacggaaaagcggatttaaccggttgtaaccctggctggggctgcgaaggtgcgatcaaccaccagcttgccgcgtatgaactgaccaataccgtgacgcataatcaggggaactacgcggcgatgatggccgacaccatcagtcgttacaaagagggcaaaccggtgttttactacacctggacgccgtactgggtgagtaatgagctgaagccaggcaaagatgtggtctggttgcaggtgccgttctctgcactgccgggcgataaaaatgccgataccaaactgccgaatggcgcgaattacggcttcccggtcagcaccatgcatatcgttgccaataaagcctgggccgagaaaaacccggcagcagcgaaactgtttgccattatgcagttgccagtggcagatattaacgcccagaacgccattatgcatgacggcaaagcctcagaaggcgatattcagggccacgttgatggctggatcaaagcccaccagcaacagttcgatggctgggtgaatgaggcgttggcagcgcagaagtaatttttattcgggcggataaggcgtttacgccgcatccgccgttctgtacacaatgcctgatgcgacgctggcgcgtcttatcatgcctacaaaccacaccgcacatttcaacaatctatctttcatcccatattcatcaacatccgctattattgatttccagcttaatcatcacctgatgaacaaaaataatgaccaaacctaatcatgagcttagcccggcgctaatcgtgctgatgtctatcgccaccggtctggcggtcgccagcaactattacgcccagccattgctcgacaccatcgcgcgtaacttttccctttccgccagttcggcaggctttattgttaccgccgcgcagttgggctatgccgccggtctgctgtttcttgttcccctcggtgatatgtttgaacgccgccgcctgattgtctcgatgaccttactggcagcgggcggtatgttaatcactgccagcagtcagtcactggcgatgatgatcctcggtacggcattaaccggtttattctcagtcgtggcacaaattctggttccgctggcagcgacgctggcttcaccggataaacgcggcaaagtggttggcaccattatgagcggtctgctgttggggatattgctggcacgaaccgttgccgggttactggcaaacctcggcggctggcgcaccgtcttttgggttgcctcggtgttaatggctctgatggcgctggcattatggcgtggtctgccacaaatgaaatcagaaacccacctcaactacccacagttgttgggttccgttttcagcatgtttatcagcaataagatcctgcgcacccgcgcgttgctgggctgcctgacctttgccaacttcagcattntctggacctcaatggcctttttgcttgccgctccaccttttaactacagcgatggtgtaattggtctgtttgggcttgcgggagctgccggagcgttgggcgctcgtccggcgggcggttttgccgacaagggcaaatcgcaccacaccacaactttcggtctgcttctgctgttactttcatggctggcaatctggtttggtcacacttccgtactggcgttgattatcggcattctggtgctggacctcaccgtacagggcgtgcatatcactaaccagacggtaatttatcgaatacatcctgatgcgcgtaatcgcctgaccgcaggttacatgaccagctactttattggcggtgccgccggttcgctaatttcagcctcagcctggcaacatggcggttcggctggcgtttgtctggctggcgcgacgattgccctggttaacttactggtctggtggcgaggttttcatcgtcaggaagccgcaaattaagcaatcagcaaccgttttcgtggctttacacttataagggtgttaagaagcccatcagtctgataaggttaagatattcattcagtctatttataatattaacaatcgttaagcgtacactctatggaaagccctactccacagcctgctcctggttcggcgaccttcatggaaggatgcaaagacagtttaccgattgttattagttatattccggtggcctttgcgttcggtctgaatgcgacccgtctgggattctctcctctcgaaagcgtttttttctcctgcatcatttatgcaggcgcgagccagttcgtcattaccgcgatgctggcagcagggagtagtttgtgggttgctgcactgaccgtcatggcaatggatgttcgccatgttttgtatggcccgtcactgcgtagccgtattattcagcgtctgcaaaaatcgaaaaccgccctatgggcgtttggcctgacggatgaggtttttgccgccgccaccgcaaaactggtacgcaataatcgccgctggagcgagaactggatgatcggcattgccttcagttcatggtcatcgtgggtatttggtacggtaataggggcattctccggcagcggcttgctgcaaggttatcccgccgttgaagctgcattaggttttatgcttccggcactctttatgagtttcctgctcgcctcttttcagcgcaaacaatctctttgcgttaccgcagcgttagttggtgcccttgcaggcgtaacgctattttctattcccgtcgccattctggcaggcattgtctgtggctgcctcactgcgttaatccaggcattctggcaaggagcgcccgatgagctatgangttctgctgcttgggttactggttggcgcggcgaattattgcttccgctatttgccgctgcgcctgcgtgtgggtaatgcccgcccaaccaaacgtggcgcggtaggtattttgctcgacaccattggcatcgcctcgatatgcgctctgctggttgtctctaccgcaccagaagtgatgcacgatacacgccgtttcgtgcccacgctggtcggcttcgcggtactgggtgccagtttctataaaacacgcagcattatcatcccaacactgcttantgcgctggcctatgggctcgcctggaaagtgatggcgattatataacccacaagaatcatttttctaaaacaatacatttactttatttgtcactgtcgttactatatcggctgaaattaatgaggtcatacccaaatggatagttcgtttacgcccattgaacaaatgctaaaatttcgcgccagccgccacgaagattttccttatcaggagatccttctgantcgtctttgcatgcatatgcaaagcaagctgctggagaaccgcaataaaatgctgaaggctcaggggattaacgagacgttgtttatggcgttgattacgctggagtctcaggaaaaccacagtattcagccttctgaattaagttgtgctcttggatcatcccgtaccaacgcgacgcgtattgccgatgaactggaaaaacgcggttggatcgaacgtcgtgaaagcgataacgatcgccgctgcctgcatctgcaattaacggaaaaaggtcacgagtttttgcgcgaggttttaccaccgcagcataactgcctgcatcaactctggtccgcgctcagcacaacagaaaaagaccagctcgagcaaatcacccgcaaattgctctcccgtctcgaccagatggaacaagacggtgtggttctcgaagcgatgagctaacgcgtcatctcgctcaaaaatccagatttataaaagaaaaaatgaccggccagcatcgcaacatgctggcctttttggcaagcaggtcggctcagccgatgagttaagaagatcgtggagaacaatatgagcgcaaatgcggagactcaaaccccgcagcaaccggtaaagaagagcggcaaacgtaagcgtctgctcctccttctcaccttgctctttataattattgccgtagcgatagggatttattggtttttggtactgcgtcacttcgaagaaaccgatgacgcatacgtggcagggaatcaaattcaaattatgtctcaggtgtctggcagcgtgacgaaagtctgggccgataacaccgattttgtaaaagaaggcgacgtgctggtcactctcgacccgacagatgctcgccaggcgtttgaaaaagccaaaactgcactggcttccagcgttcgccaaacccaccagcagatgattaacagcaagcagttgcaggcgaatattgaggtgcaaaaaatcgccctcgcgaaagcacaaagcgactacaaccgccgtgtgccgctgggcaatgccaacctgattggtcgcgaagagctgcaacacgcccgcgacgccgttaccagtgcccaggcgcaactggacgtcgcgattcaacaatacaatgccaatcaggcgatgattctggggactaaactggaagatcagcctgccgtgcaacaggctgccaccgaagtacgtaacgcctggctggcgctggagcgtactcgtattgtcagtccgatgaccggttatgtctcccgccgcgcggtacagcctggggcgcaaattagcccaacgacgccgctgatggcggtcgttccagccaccaatatgtgggtggatgccaactttaaagagacgcagattgccaatatgcgtatcggtcagccggtcactatcaccaccgatatttacggcgatgatgtgaaatacaccggtaaagtggttggtctggatatgggcacaggtagcgcgttctcactgcttccggcgcaaaatgcgaccggtaactggatcaaagtcgttcagcgtctgcctgtgcgtatcgaactggaccagaaacagctggagcaatacccgctgcgtatcggtttatccacgctggtgagcgtcaataccactaacagtgacggtcaggtactggcaaataaagtacgttccactccggtagcggtaagcaccgcgcgtgaaatcagcctggcacctgtcaataaactgatcgacgatatcgtaaaagctaacgctggctaatccagaggtgcgtgtgatgcaacagcaaaaaccgctggaaggcgcgcaactggtcattatgacgattgcgctgtcactagcgacattcatgcaggtgctggactccaccattgctaacgtggcgatccccactatcgccgggaatcttggctcatcgctcagccagggaacgtgggtaatcacttctttcggggtggcgaatgccatctcgatcccgcttaccggctggctggcaaagcgcgtcggggaagtgaaactgttcctctggtcaaccatcgcctttgctattgcgtcgtgggcgtgtggtgtctccagcagcctgaatatgctgatcttcttccgcgtgattcaggggattgtcgccgggccgttgatcccgctttcgcaaagtctattgctgaataattacccgccagccaaacgctcaatcgcgctggcgttgtggtcgatgacggtgattgtcgcgccaattnnnngcccaa

SEQ ID NO: 1454 - DNA, 4896 bp, Escherichia coli
  Strain O55:H7
  modified_base (194)..(194): a, c, g or t
  modified_base (548)..(548): a, c, g or t
  modified_base (1097)..(1100): a, c, g or t
  modified_base (1671)..(1672): a, c, g or t
  modified_base (1767)..(1767): a, c, g or t
  modified_base (2064)..(2064): a, c, g or t
  modified_base (4889)..(4892): a, c, g or t
  modified_base (4894)..(4895): a, c, g or t
ggcggatatatcagcgataattaccactggggctggatattcttcatcaacgtgccgattggcgtggcggtggtgttgatgacactgcaaactctgcgcggacgtgaaacccgcaccgaacggcggcggattgatgccgtggggctggcactgctggttattggtatcggcagcctgcagattatgctcgaccncggtaaagagctggactggttttcatcacaggaaattatcatccttaccgtggtggcggtggtggctatctgcttcctgatcgtctgggagctgaccgacgataacccgatagtcgatctgtcgttgtttaagtcgcgcaacttcaccatcggctgtttgtgtatcagcctcgcgtatatgctctacttcggcgcgattgttctgctgccgcagttgttgcaggaggtctacggttacacggcgacctgggcaggtttggcctctgcgccggtagggattattccagtgatcctgtcgccgattatcggccgcttcgcgcataaactggatatgcgccgactggtaaccttcanctttattatgtatgccgtctgcttctactggcgtgcctatacctttgaaccaggtatggattttggcgcgtcggcctggccgcagtttatccaggggtttgcggtggcctgcttctttatgccgctgaccaccattacgctgtctggtttgccaccggaacgactggcggcggcatcgagcctctccaactttacgcgtacgctggcggggtctatcggcacgtcgataaccacaaccatgtggaccaaccgcgagtcgatgcaccatgcgcagttgactgagtcggtaaacccgttcaacccgaatgcccaggcgatgtacagtcaactggaagggcttgggatgacacaacagcaggcatcaggctggattgcccagcagatcaccaatcaggggctgattatttccgccaatgagatcttctggatgtcggccgggatattcctcgtcttgctggggctggtgtggtttgctaaaccgccctttggcgcaggtggcggcggaggcggtgcgcactaagtacaactaagccagttcatttgaactgnnnnttttcaattaattgtgaagatagtttactgactaaatgtgcagttcctgcaacttctctttcggcagcgccagttcttcgttgctgttgatgcgcacgtcacgttccagaatgctacgcgcaatatcctgcgcttcctgcaacgagtgcatctggtaagtgccacactggtagacgttcagctccggaatctgattctgatcctgcactttcagcacgtcttccattgccgctttccagacatcagcaacacgctgctcatctggcgtaccaatcagactcatataaaaaccggtgcggcagcccattggcgagatatcgataatctctacaccattaccgttaagatggttacgcataaaaccagcaaacaggtgctccagggtatggatccctctttctggcatcacttctttgttcggcacgcagaagcgcagatcgaacacggtgattgcgtcgccatgcggggtgttcattgttttcgccacccgaactgcaggcgcttccatccgggtatgatcgactgtgaagctatctaacaacggcatttagccacctccggtaattttttnnaaaattttctgaactctttcttcccaggcgagtctgagtatatgaaagacgcgcatttgttatcatcatccctgaattcagagatgaaattttgnccactcatgagtggcctttttcttttctgtcaggcgtgtttttccagccacaccgcaaacggttcggtatctgcggcttccatttcctgctgacggcgttcagatgcctcgcgctcggctacaaaatcctcttcgcgcagaatttccagcggctcttcacgcagcagattacggtacgcttcagcaaacgctttgcctgttccgccaataccagtatcaatcatagaccttaagatacgggcagagaaagtcagatcgggattatcgaagcaggcaaccagttcatcacacactttntgatacgcttcgccgccgttaatgctatccagcgtttgcgcgacgcgtttcagatcgcggaacagatctttacccacctgcggtaacgggaactgtgcggtttcgcagccgatacccagcgtcagacccggtttgcgaccttcgaggatcacccggttccagttaacgcgtgtacaggcaagttcgctactgctcatttccggtgcatcagccagcgcacaccagaccataaacaggtcgaggaatcgcacctgctgttcatctacaccaatcggcgagaacgggttgatgtccagcgaacgcacttcaatatattcaatgccgccacgtaacagcgcatcagaaggcgactcgccgctgcgggtaacgcgttttggacgaatcggcgcgtacagttcgttttcaatctgcagcacgttgctgttgatttgcagcctcttaccgtctttatcaataccaatcttcgcgtactcttccgatggcgttttgattgcctgtttcaggcccgctatgtactcgtaaagatcgttgaaggtaataccaagattgctttgcgatttattggtatagccgagatcgctcaaacgaagagaggtcgcatacggcaggtaatacataccgcactcggttttctcaaacggcagcgacgttggtttaccttgcaggaatgaagagcatattgccggagacgcgccaaacagataaggaatgacccaaccgaagcgatagtagttgcgaataacgcggaaataacccgcagagattttctctttagcatcagcgcccgaaatatcgccacacttcgcttgccagaatgccataggcaaagagaagttgtaatgcacgccggagatggtttgcatcagcgcgccgtagcgatttttcagcccttcacggtacagcgttttaaagcgtccggtgttagaagtgccgtactgcgccagttcgatgtcctgaccttctgcgatgtagcatggcatacttaacggccacatccgctcatcgcccatattgcgcgccgtataacgatgcagatcgcgcataaaggtcagcatatgttcaatatcaccatccactggtgtaatgaattccagcaatgcttccgcaaaatcggtagtaatccatttatgcgtcagtgcggaacctaatgcttcaggatgacctgttgttgccagtgtgccatcagcattaacacgcaaagtttcgcgctccagcccacgctgtatcccctttaacgcctgaggatgtttttccagccaggccagcgcctgtgatacgtccgggatcaaattgacctcccgcctgtcaaaatcgttttaattagcataactgtaatggtgaccatatgtgcaggcctacaattagtgccaccacatcatgccctgaacggtcgctgctgcaactgcaacatagcgtaacgctttaccaaggcacaaaaaaaagattaccggcccccaggagatgcgcatccatcccgctaacagacacagtaaatcgccaaccacgggcatccagcttaataatagcgtgactgcaccatagcgtttcagccagccggtagctttctcttgccagcgcgatgttttacgcaatggacagaaacgcccaaggataacgttagttaaccctccaaggctattacccattgttgctgttaaaactaaaacccagggatgactgatcccagaaagcaacattgccaccagcacgacttcggagttgccgggtaatagtgtagcgctgagaaaactactggcaaacaacgagaaaagcgataacgcttcactcacagcaagcgaacatccacagcgtccatgcctgctgcacgggccgcctgaataccgaaatcggcatcttcaaagaccacacactgcgtcggttgcacgcccatacgctgcgcgcacaacaaaaatgtgtctggcgcgggtttatggtgtttgacgtgatcggcagcgacgacggcgtcaaaataacggcgtaatcccaggtgagccagcaatgcctcagcgatggcgctttcactccccgttcctacagccattgggcgacgaccatgccaacttttcaccacttcaacaagaggaagcggctcgacactatccagcagcatacttcttactgcttctgttttttcacgcgctaacgcatgcgggtcgagatcggcctgattcagctcaataattgcctgagcaatacgccaggtgggcgatccattaagcgcaatcatcgcctgaacatcgtactgaagaccgtagtgccctaatacttcgcgccacgctttacggtgcgtaggctccgtatccaggattgtgccatccatatcaaaaattaaacctgcataacgctcgtacatggtcttctcgcaagtcgaaaaatatgacgctactttagcgtaattgcttgattttgtcgctgatggcgaaggagaagaaaattcaggaaatggataaagtagttatttagaaatgagatatttttgaaggaaattttttggagaagatggtgcatccgggaggatgactcactggcgttcgcccttcgggccgttgctaaagcaacgttatccttcctggtgcctgcggttaattccactacctcttcgatatcttcattgctgaagatttcggagaatatggtgcatccgggaggattcgaacctccgaccgctcggttcgtagccgagtactctatccagctgagctacggatgcatcgggaaaatttattttactgctgatattgatatcgctactaaagccatatcaaataagaaaatccatcttaaccatcatcactgatgattacggagaatatggtgcatccggnnnnannc

SEQ ID NO: 1455 - DNA, 114 bp, Escherichia coli
  Strain O55:H7
  modified_base (3)..(4): a, c, g or t
  modified_base (107)..(108): a, c, g or t
  modified_base (112)..(113): a, c, g or t
tanncgagtactctatccagctgagctacggatgcatcgggaaatttattttactgctgatattgataccgctactaaagctgtatcaagtaagagatggtgcatcnngganna

SEQ ID NO: 1456 - DNA, 86 bp, Escherichia coli
  Strain O55:H7
tgagctacggatgcatcgggaaacttactttactgcagattttttgataccgctactaaagccgtatcaagtaagagatggtgcat

SEQ ID NO: 1457 - DNA, 6713 bp, Escherichia coli
  Strain O55:H7
  modified_base (3)..(4): a, c, g or t
  modified_base (3662)..(3665): a, c, g or t
  modified_base (4568)..(4568): a, c, g or t
  modified_base (4798)..(4798): a, c, g or t
  modified_base (5192)..(5192): a, c, g or t
  modified_base (5887)..(5887): a, c, g or t
ganngctcggttcgtagccgagtactctatccagctgagctacggatgcaaatggcggtgaggcggggattcgaaccccggatgcagcttttgaccgcatactcccttagcaggggagcgccttcagcctctcggccacctcaccacacgcctcttacgagtgcttcgaagaacttgtttatcgctcatcgtcgctgcgtggcgcacatattactttctgagacttataagtcaaacaatttttcccacacttttatcgtttgcacacttcacgctcaattagtctgtaaaaacgtcaaaaagagtgttttatctacagaaaaacggaggtctggcagatagcagtaatgcaaaaaaatggagacttaagttgaatgaacgggagtaaagcgaaaagactatagagtgaaggagaaattttgagggtgcgtctcaccgataaagatgagacgcggaaagattagtaactggactgctgggatttttcagcctggatacgctggtagatctcttcacggtgaacagaaacttccttcggggcatttacgccaatacgtacctggttgccctttacccctaaaactgtcacggtgacctcatccccaatcatgagggtctcaccaactcgacgagtcagaatcagcattctttgctccttgaaagattaaaagagtcgggtctctctgtatcccggcattatccatcatataacgccaaaaagtaagcaatgacaaacacattacatgtaagcagtcatggcattacattctgttaaacctaagtttagccgatatacacaacttcaacctgactttatcgttgtcgatagcgttaatgcgaatgccgtgaagcgagtccacggcattgcctgacgcttatattattgcaatttcgcgctgacccagcctttcacactggctaacgctgcaggtaaggccgcagcatccggtaccaccggcttgcgccatgtcaggacgtccaccacccttgccgcccacctgctgagcgaccataccaatcagttcccctgctttcacacgatctgtgacgtccttagatacgcctgcaatcagagaaaccttaccttcggctaccgttgccagcacgataattgtcgaccccagctgattttttaaatcgtcaaccatggtacgcaacattttcggctcaacaccgctaagctcgctaaccaacagcttaacaccattaacatcaattgccttactggaaagatttgcgctctcctgtgcggcagcttgttctttaagctgttgtagttctttttctaactgacgcgtacgttccagtactgagcgcactttatccgccagattattgctatcgcctttcagcagatgcgcgacttcgcttaagcgatcgctgtctgcatgaacggtggtgatagcgccttctccggttaccgcttcgatacgacgaacgcctgcagcagtacccgattcagagatgatgcggaacagaccaatatcaccagtgcggctggcgtgagtaccgccacacagctcggtggagaaatcgcccatgctcagcacgcgtacacgctcatcatacttctcgccgaacagcgccatcgcacctttcgctttcgccgcttcgagatccatgatgttggtttcaatcggcaaattgcgacgaatctgtgcgttcaccaggtcttcgaccgcacgaatctcttccggtttcatcgcttcgttgtgtgagaagtcgaagcgcagcaccttgtcgttaaccagtgaacctttctgcgatacatgagtccccagaacctggcgcagcgcagcgtgcatcaggtgcgttgcggagtgattcagacgaatacgggcgcgacgagcctcatcaacatcagcctgcacagcgtcgcccactttcagagaacccgcagcaagtttaccgatgtgaccaatcgcctggccgtatttctgcgtatcttccaccacgaaggagaagttagcgcctttcagttcgcctttatcaccaacctgaccgccggattccgcatagaatggcgtttgatccagcacgaccacagcttcctggcctgcattgatggcatcaaccgctttaccatcaacaaacagcgcggtcactttgccgttcagttccagatggtcatagcctttaaattcagatgcactgtcaacacggatcattgcgttgtaatcggcaccaaagccgctggcttcgcgcgcccgacgacgctgctcttccattgctgcttcaaaaccagcttcgtcaactttgatgttgcgctcacgacaaacatcagccgtcaggtcaaccgggaagccataggtgtcgtacagacggaaagcagtttcaccatccagcgtatcaccagaaagttttgccagctcttcatccagcaacgccagaccgcgctccagagtacgagcaaactgctcttcttcagtcttcagcacctgctcaacctgcgcctgctggcgtttcaggtcttcacccgcagagcccataacgtcgatcagcggaccaaccagtttgtagaagaaggtttctttcgcgccgagcatattaccgtgacgcactgcgcgacgaatgatacgacgcagtacataaccacggttttcattggacggcattacgccatccgcgatcaggaacgcacaagaacgaatgtggtcagcgattacgcgcagcgatttattgctcagatcggttgcgccagtgactttcgctaccgcctggatcaacgtgcggaacaggtcgatgtcatagttagagttaacgtgttgcagcaccgcagcaatacgctccagacccataccggtatctacagacggcttcggcagcggttccatcgtgccatcggcctggcggttgaactgcatgaagacgatgttccagatctcaatgtagcggtcgccgtcttcttccggacttcccggagggccaccccaaatgtggtcgccgtgatcgtagaagatttcggtgcacgggccgcacggaccagtgtcacccatctgccagaagttgtcagatgcgtatggcgcacctttgttatcgccgatgcgaataatacgttcgcgcgggatccctacttctttttcccagatttcgtaggcttcgtcgtcgctttcatagacggtaacccacagacgctctttcggcagggcaaaccatttttcgctggtcagcagttcccatgcaaactgaatggcatcgtgtttgaaatagtcgccgaagctgaagttgcccagcatttcgaagaaggtatggtgacgcgcggtgtaaccgacgttttccaggtcgttgtgtttaccacccgcacgcacgcagcgttgggaagtggtagcgcgggaataattacgcttgtcgagcccaaggaacacatccttgaactggttcatcccggcgttggtaaacaacaaagttgggtcgttatggggtaccagggagctgctggcaactacctgatgtcccttactatggaaaaagtcgagaaacgcctgacggatctcagcggtgctcttgctcataattatcctgaaatcaagctaacgaaatatcgccaccagctccagcgtgtcttaaccgccgggctggtaactgaaaagtgggaataagataagttttcttgactgggaagtaaaataccgtatgcgttcagtcggcaaaatttcgccaannnncctggatatcttccatcagatagccacgatagagcagaaaacgctggatcttaactttttctgaaaagacagttggcaaaggttcaccatattttcgcgtcgcctgatcgcgcgccagtgcgcaccagtcgatgtcacattcacgcatcgctttttctgtcgcttcgcgggaaatacctttctgattcagttcctggcgaatacgcgcaggtccataacctttgcggctacggctggcgataaagcgcgcaacaaatcggctgtcatcgagatagccatgttcatggcaccaggcaataacgcgctcgtaatcttctgccgtagcatcaatctcttctgggccatttttgcccataatcggtgccgcgagtttacgtcgcagttcttgctcactgtgatcgcgcaccgccagaatgcgtaccgcacgatccaacaggcgagcatatgccgggcgacgggacgttgattctgtcatggcatatccttacaacttaaaaagcaaaagggccgcagatgcgacccttgtgtatcaaacaagacgattaaaaatcttcgttagtttctgctacgccttcgctatcatctacagagaaatccggcgttgagttcgggttgctcagcagcaactcacgtactttcttctcgatctctttcgcggtttccgggttatctttcagccaggcagttgcattcgctttaccctgaccgatcttctcacctttgtagctgtaccacgcgcctgctttctcgatcagcttctcttttacgcccaggtcaaccagttcgccgtagaagttgataccttcgccgtagaggatctggaattcagcctgtttaaacggcgcagcgattttgttcttcaccactttcacgcgggtttcgctacccaccacgttttcgccntctttcaccgcgccgatacgacggatgtcgagacgaacagaggcgtagaatttcagcgcgttaccaccggtagtggtttccgggttaccgaacatcacaccaattttcatacggatctggttgatgaagatcagcagcgtgttggactgcttcaggttacccgccagcttacgcatcgcctggctcatcatacgtgccgcaaggcccatgtgagagtcgccgatttcgcnttcgatttccgctttcggcgtcagtgccgccacggagtcaacgacgataacgtctactgcgccagaacgcgccagggcgtcacagatttccagtgcctgctcgccggtgtccggctgggagcacagcaggttgtcgatatcgacgcccagtttacgtgcgtagattgggtccagcgcgtgttcagcatcgataaacgcacaggttttaccttcacgctgcgctgcggcaatcacctgcaacgtcagcgtggttttaccggaagattccggtccgtagatttcgacgatacggcccatcggcagaccacctgccccaagcgcgatatccagtgaaagcgaaccggtagagatggtttccacatccatggaacggtcttcacccaggcgcatgatngagcctttaccaaattgtttctcaatctggcccagtgctgccgccaacgctttctgtttgttttcgtcgatagccatttttactcctgtcatgccgggtaataccggatagtcaatatgttctgttgaagcaattatactgtatgctcatacagtatcaagtgttttgtagaaattgttgccacaaggtctgcaatgcatacgcagtagcctgacgacgcaccgcatcacggtcgccgctgaagcattcccgcagggtaatgccttcaccgcgggcagtggcaaaagcaaaccagacggtgccgacaggcttctcttcactgccgccatccggcccggcgataccactaatagacacggcataatcagcacgagccgctttcagtgcacctatcgccatttccaccacgacgggttcactcactgcgccatgctgcgccagcgtctcttcgcgtacgccgatcatttgcgctttggcttcgttactgtaggtgacaaatccgcgttcaaaccaggcggaactgccggcaatatcggtaatcactttcgctacccaaccgccggtacaagactcagcagttgttacggttgcgccacgggctttcagcgcctgcccaacctgttcgcttaactgcatcagttcactgtcagtcatcacaacctctgtcagtcaaaaatttatgccggacaagatancactttcgtcaggaagatggtgttggcgttgcaattttacgaggaggattcagaaaaaagctgattagccagagggaagctcacgcccccctcttgcaaatagttactgcacgcgcgccagcgccacggcttgtcctaactgccagaccgccattgcgtaatgggtactgtggttataacgggtaatggtgtagaagttcggcagaccgtaccagtactggtaacctgttccaacatccagacgcagcaggctggcttgttgatggttgcccagcggctgctgtggcgttaaacctgccgcggcaagctgcgaaatgctgtacctggttttgaagccatttggcaagcctggagcctgaccgtttgccattaccgcgacctgatcgcctttcacccagccgtgcgctttgaaataattcgccacgctaccgatcgcatcaaccggatcccacaggttgatatgcccgtcgccgctgaaatctaccgcatattgtttgtaagacgacggcataaactgtccgtagcccatcgccccggcaaaggaacctttcagattgagcggatcgtcctgctcgtcgcgcgccatcagcaggaaggtttccagctcgccagagaaatactccgcgcggcgtgggtagttaaatgacagcgttgccagcgcatcgaggatgcgagttttccccatcacgcgcccccagcgggtttcaacgccgataatcccgacgataatttccggcggtacgccatacacctgccacgcgcgattcaacgcatcttcatactgattccagaaaaccacaccgttctgcacattgtccggcgtaat

SEQ ID NO: 1458 - DNA, 12761 bp, Escherichia coli
  Strain O55:H7
  modified_base (2)..(3): a, c, g or t
  modified_base (507)..(508): a, c, g or t
  modified_base (510)..(513): a, c, g or t
  modified_base (517)..(518): a, c, g or t
  modified_base (520)..(521): a, c, g or t
  modified_base (2024)..(2024): a, c, g or t
  modified_base (2032)..(2032): a, c, g or t
  modified_base (2079)..(2082): a, c, g or t
  modified_base (3942)..(3945): a, c, g or t
  modified_base (4467)..(4467): a, c, g or t
  modified_base (4607)..(4607): a, c, g or t
  modified_base (5261)..(5261): a, c, g or t
  modified_base (9233)..(9234): a, c, g or t
  modified_base (10276)..(10276): a, c, g or t
  modified_base (10349)..(10349): a, c, g or t
  modified_base (11404)..(11404): a, c, g or t
  modified_base (12269)..(12269): a, c, g or t
tnncgataacgcagccatgcgccgttcggacctgatggcggtttcaccgatgtggttggtgcctggttatccatcagccgcagtaccgaatccagacgtttcgcctgggagagaatttcctgcaactgctgacgatcgaaaccgtgtttgttcaccattctgtcgatgaactgctgggcattcgggttattagcgaaatcgccgcccatctgcatcacattgtgctgcggctcaagcaggaagccgccagacggcgttccggtggtcgtttcagtctcagtaggttttggcttgctgctacaggcggcaagcaacacaaaaaggggaagcaatgttacataacgacgcttgaacatgaggggtccatttaacagattcaaccaggggcaagtatggtaaagcatcacgccccgcacaaggaagcggtagtcactgcccgatacggactttacataactcaactcattctcctcgctatccttttactcaaactttcaaattaaaatnntnnnntttnntnntgcgatcaaaataacattttaaatctttcaatctgattagattaggttgccgtttggtaataaaacaataaatcctgaaggagagaacaatgatagaaaccattactcatggtgcagagtggtttatcgggctgttccaaaagggcggagaggtgtttaccgggatggtgaccggcattcttccgctgttgattagcctgctggttatcatgaacgcactgattaattttatcggtcagcatcgtattgaacgttttgctcaacgttgcgccggtaaccctgtttcccgttacctactgttaccgtgcattggcacgtttgtcttttgcaatccgatgaccttaagcctgggtcgctttatgccggaaaagtacaaacccagctactacgcggcggcctcttatagctgccactcaatgaatggcctcttcccccatatcaaccctggcgaactgtttgttatcttggcattgccagcggtctgacaacgctgaacctgccacttggcccactggcggtgagctatctgctggttggtctggtcaccaacttcttccgcggctgggtgaccgatctgaccaccgctatttttgagaaaaagatgggcattcaacttgaacaaaaagttcatctggcaggagcaacatcatgacgcatattcggatcgaaaaaggaacggggggctggggcggcccgcttgagctggaaaccacgccgggcaaaaaaatcgtctatatcaccgsgccggtacccggcctgcgattgtcgacaaactggcacagcttactggctggcaggctattgacggatttaaagaaggtgaacccgcggaggcggaaattggtgtcgcggtaatcgactgtggcggcacattacgctgcggcatttatccgaaacggcgtattcccaccattaatatccactcgacgggcaagtccggtccactggcgcagtacattgtggaagatatttatgtctctggcgtaaaagaagaaaacatcactgtagtgggtgatgcgacaccacaaccctcttccgtgggccgtgactatgacaccagcaagaaaatcaccgaacaaagcgatggtttactggcgaaggtgggaatgggtatgggttctgccgttgccgtgttgtttcaatctggtcgtgacaccatcgacactgtattaaaaaccattcttccgtttatggcattcgtctcggcgctcattggcatcattatggcttctggccttggtgactggattgcccacggccttgctccgctggcgagccatccactgggtctggtcatgctggcgctcatctgctccttcccgctgctttcacctttcctcggcccaggcgcagttatcgcacaggttatcggcgtattgattggcgtgcagattggtctcggcaatattccgccgcatctggctttacctgcactgtttgccatcaacgcgcaggcggcctgcgacttcattccggtcggtttgtcgctggcggaagcccgtnaggacacngttcgcgtcggtgtcccttctgtactggtgagccgctttttaaccgnnnngccgactgtactgatcgcctggtttgtctccggttttatctatcaatagaggctgaaacatgaccgttatttatcagaccaccatcacccgtatcggcgcgagtgccactgacgccctcagcgaccagatgctcatcacctttcgtgaaggcgcgccagcggacctcgaagagtattgcttcattcattgccacggcgagttgaaaggtgcactccatcccggtttgcaatttacgctcgggcagcatcgctatccggtgaccgctgttggcagcgtggcggaagacaaccttcgcgaactgggtcatgtcaccctgcgcttcgatggtttaaacgaagcggaatttccgggcactgtccatgtggcaggccctgtacccgacgatatcgcgccgggatcggttttgaagtttgaatctgttaaggagtaaaaaatgaatcaggttgccgttgtcatcggtggtgggcaaaccttaggcgcgttcctgtgccacggtctggctgccgaggggtatcgcgtcgcggttgtcgatattcagagcgacaaagccgcaaatgtggcacaagaaattaacgccgaatatggtgaaggaacagcgtatggttttggtgctgacgccactagcgagcaaagcgttctggcgctctctcgtggggtagatgaaatctttgttcgtgtggatttactggtctacagcgccggaattgcaaaagcagcctttatcagcgacttccagctcggcgattttgaccgttcgctacaggtgaatctggtgggttatttcctgtgtgcgcgtgaattttcgcgtttgatgatccgcgatgggattcagggacgcattattcagatcaactcgaaatccggcaaagtgggcagcaaacacaattctggttatagcgccgcgaaatttggtggcgtagggctgactcaatcactggcgctggatctggcggagtacggcattacggtgcattcactgatgctcggtaacctgctgaaatcgccgatgttccagtcgctgttgccacaatatgccaccaagctgggtatcaaaccggatcaagtcgagcagtattacatcgacaaagtaccgctcaaacgcggctgcgattatcaggatgtgctgaatatgctgctgttctacgccagtcctaaggcgtcgtactgtaccggacagtcgatcaatgtcaccggcggtcaggtgatgttctgatcaacagcggagatccgttaaggatctccgtgagactaatagaatgcctgatgcgctacgctcatcaggcatacaggacttccgccactacattaaggaaaagttatggtatccgcactcatcactgtcgccgttatcgcctggtgtgcgcaactggccttaggcggctggcaaatttctcgttttaaccgtgccttcgacacactatgccagcaagggcgggttggcgtgggccgttccagcgggcgctttaaaccgcgggtcgtggtcgccatcgccctggacgatcagcagcgcatcgccgacaccttgtttatgaaaggactgaccgtcttcgcccgaccgcaaaaaattcccgcaattaccggtatgcatgcgggtgatttacagcccgatgtgatctttccccatgatccactatcacagaatgctctatcattggcgcttaaactgaaacgtggataatttcgttgtgaatgttacttgcttgcgaagttatcattttgaaacctaaatcaggtaatcacgcccatgaaacctcgtcagcgtcaagccgccattctggagtatctgcaaaagcagggaaaatgctcggttgaagaattggcgcaatattttgacaccacaggcacaactattcgcaaannnnctggtcattctggaacatgccggaaccgtcattcgtacttatggcggagtggtgttgaataaagaggaatccgatccgcctatcgatcataaaacactcatcaacacccacaagaaagagctgatagcagaagctgccgttggttttattcatgatggcgattcgatcattcttgatgctggcagtaccgttttgcagatggtgcctctgctctcgcgctttaataacatcacggtgatgaccaacagcctgcatatcgtcaatgcgttatctgaactggataatgaacaaactatcctgatgccaggcggaacgtttcgtaaaaaatcggcctcatttcacgggcagctggcagagaatgccttcgagcatttcaccttcgacaaattattcatgggtaccgacggcatcgatctcaatgcgggcgtaaccaccttcaacgaggtctataccgtcagtaaggcaatgtgcaatgccgcgcgcgaagtgattttgatggcggactcatcaaagtttggccgnaaaagccccaacgtagtttgcagtcttgaaagcgtcgataagctgattaccgacgcagatatcgatccggcgtttcgtcaggcgctggaagagaaagggatcgatgtgatcataaccggagagagcaatgagtgaagcantactgaacgcgggacgtcagacgttaatgctggaattgcaggaagcaagccgtttaccggaacgtctgggcgatgattttgttcgcgccgccaatatcatcctgcactgcgaaggcaaagtggtggtttcgggaattggcaaatcgggccacattggtaagaaaatcgccgcaacgcttgccagtaccggcacaccggctttttttgtccatccggcagaagcgctgcatggcgatctggggatgatcgaaagccgcgatgtgatgctgtttatctcttactccggtggggcgaaggaactggatctgattattccgcgtctggaagacaaatctatcgcgctgctggcgatgaccggcaaaccgacgtcaccgctgggcctggcggcgaaagcggtgctggatatctccgtagaacgcgaagcctgcccgatgcaccttgcgccgacctccagcaccgtcaataccctgatgatgggtgacgcgctggcgatggcggtcatgcaggcgcgcggatttaatgaagaagattttgcccgctcccaccctgctggagcactgggcgctcgcttgctgaataaagtgcatcatctgatgcgccgtgacgatgccatcccacaggtggcgttaaccgccagcgtgatggatgctatgntggaactcagccgcaccggtctggggctggtggcggtatgtgacgctcaacaacaggtacaaggcgtctttaccgacggcgatttacgtcgctggctggttggcggcggcgcactcaccacgccagtcaatgaagcgatgacggtcggcggcaccacgttgcaatcgcaaagtcgcgccatcgacgccaaagagatcctgatgaagcgcaaaatcactgccgcaccggtggtggatgaaaacggcaaactcaccggcgcaataaacctgcaggatttctatcaggccgggattatttaatccttcaatcccagacgtttcgccagccgatgcaggttggcgacgtcggtttccagcatccgcgcgcaggcagcccagttgtgatgattttgtgccagtgcctgacgaatagtttcacgctggaacgcttctgtcgcttcacgcaggttttgcttaacaacgggcaccgccgccacttctggcggcggcaacgtcacctcaggaaaagcaaaatgttgcgcctcaagaatcacttcatcgccgctgcgggtggctctcgccagcactaccgcccgatgaatagcatgttccagttcgcgcacgtttcccggaaaactgtagtgttgcagtaaatttcgcgccccggcacttaataccacgcgggagagcccctgccgcaaacgacactgctcgcagaaataccccgccagcagaatgacatcatcgccccgctcacgcagcggcggcaccgaaagtggaaacacactcaggcgatgaaacaaatcggcgcggaatcgccctgccagcacctcttcgcgtaagtcgcggttagtcgccgccagcacgcgcacatcgacccgcaaactacggtcatcgccaacgcgctgaatatcgccatactgcaacaccctcagcagcttggcctgcaatgccaacgacaactcgccgatctcatcgagaaacagcgtgccgttatccgccatttcaaacttcccactgcggttactgatagcgccagtaaacgctcctttcacatgcccgaacaactcactttccgccacactttccggcagtgcggcacagttgagatagaccagcggattcaccgcccgtggcgaggcctcatgaatcgctttcgccaccagctccttaccggttcccgtctcaccgctgatcaggacgttgagatcggacgccgccacaatctcaatctcttttttcagttgcgtcatgcctggcgacagaccgatcatctgcgtctgtttcaccgcttcaaatggagcggcatcgcccggcagcatattctggctttccagttgttcaatcagcaacgcattgcttaacgctcccgccgccagcgcggcaatcaggcgtaactcttcgtcgctgaaaacatcgaactgatcgggctgcatcccgtcgagcgtcaatgcgccgatcaggttttgcccggcaaacagcggcagaccaacgcaggcgtgaaccttcagactctcctgccctggaatcaaaccgtcatagggatcgggcaattcgctgtctgcgggaaagcgcaccacatcacccgcgcgggcaatcgcttccagccgtggatgaccttccagcgcaaagcgtctaccgagtacatccttcgccagcccgtcgatggcaagcggaataaactgccgcgagtcgtaacgtagcaacgcagacgcatcgcactccagcacctgacgcagcgtggtgatcaggcgctgaaaacgatcctgatgaccaatcccacgctgcaattcgatggcgatattcgccagcacatcaacggaaaaactcatctttgcctcactgtcaatttgactatagatattgtcatatcgaccattggattgatagtcattttgactactcattaatgagcataattttatttatagagtaaaaacaatcagataaaaaactggcacgcaatctgcaattagcaagacatctttttagaacacgctgaataaattgaggttgctatgtctattgtggtgaaaaataacattcattgggttggtcaacgtgactgggaagtacgagattttcacggcacggaatataaaacgctgcgcggcagcagctacaacagctacctcatccgcgaagaaaaaaacgtgctgatcgacaccgtcgaccataaattcagccgcgaatttgtgcagaacctgcgtaatgaaatcgatctggcggatatcgattacatcgtgattaaccatgcagaagaggaccacgccggggcgctgaccgaactgatggcacaaattcccgatacgccgatctactgtacagccaacgctatcgactcgataaatggtcatcaccatcatccggagtggaattttaatgtggtgaaaactggcgacacgctggatatcggcaacggcaaacagctcatttttgtcgaaacaccaatgctgcactggccggacagcatgatgacttacctgacaggcgacgcggtgctgttcagtaacgatgctttcggtcagcactactgcgacgagcatctgttcaacgatgaagtggatcagacggagctttttgagcagtgccagcgttactacgccaatatccttacgccgttcagccgtctggtaacgccgaaaattaccgagatcctgggctttaacttaccagtcgatatgatagcgacctctcacggcgtggtatggcgcgataacccgacgcaaattgtcgagctgtacctgaaatgggcggctgattatcaggaagacagaatcaccattttctacgacaccatgtcgaataacacccgcatgatggctgacgctatcgcccaggggattgcggaaaccgacccacgcgtggcggtggatcgtctttccacgcgcctgcaggatgcgggtttcgaaatgtcgcttagcctgaaagcgaaatggcgaccagaccaggacgctctggagttatgccgtgaacacggtcgcgaaatcgcccgtcagtgggcgctcgcgccgctgccgcagagcacggtgaatacggtagttaaagaagaaacctctgccaccacgacggctgacctcggcccacggatgcagtgcagcgtctgccagtggatttacgatccggcaaaaggcgagccaatgcaggacgttgcgccaggaacgccgtggagtgaagtcccggataacttcctgtgcccggaatgctccctcggcaaagacgtctttgacgaactggcatcggaggcaaaatgagcaacggcattgtgatcattggttcgggcttcgccgcccgccaactggtgaaaaatattcgcaaacaggacgccagtattccattaaccctgattgccgccgacagcatggatgagtacaacaaacctgacctcagccatgttatcagtcaggggcaacgtgccgacgaccttacccgccagacggcgggtgaatttgccgagcagtttaatctgctcctgtttccgcaaacctgggtgacggatatcgatgccgaagcccgtgtggtgaaaagccagaataatcagtggcaatacgacaagctggtgctggcaaccggtgccagcgcctttgtcccgccagtgcctgggcgtgagttaatgctgacgttaaatagtcagcaagagtatcgcgcctgtgaaacgcaactgcgggatgcccgacgcgtgttgattgttggcggtggtttgattggtagcgaactggcgatggatttttgtcgtgcaggcaaaatggttacgctaatcgacaacgctgccagtattctggcgtcgttaatgccaccggaagtaagcagtcgcttgcagcatcggttgacggagatgggcgttcatctgctgttgaaatctcagttgcaggggctggaaaaaacggattctggcattctggcaacgctggaccaccagcgcagcatcgaagtggatgcggtaattgccgccaccggactgcgcccggaaaccgccctggcacgacgcgccggnntgacgattaatcgcggcgtttgcgtcgatagttatctgcaaaccagtaatgccgatatttacgcgctgggcgattgcgcggaaattaacggtcaggtattgccgttcctgcagccgattcaacttagcgcgatggtgctggcaaaaaatcttctcggcaataacacgccgctgaaactaccggcgatgctggtgaaaatcaaaacgccggaattaccgctgcatctggcaggcgaaacccagcgtcaggatttacgctggcagattaataccgaacgccagggaatggtggcgcgcggtgttgacgatgcagaccaacttcgcgcctttgtggtcagtgaggatcggatgaaagaggcatttggattgttgaaaacgttgccggtgtaggtgggctactgtgcctaaaatgtcggatgcgacgctggcgcgtcttatccgacctacggggacgcatgtgtaggccggataaggcgtttacgccgcatccggcaatggtgtccaaatgcaacacgttttatccgttctggacttcacccgctaaccaacgcgccgcagcaataaccccctgccccagagacaaaccgccatcacccgccggtaaactctgtggaaacagcaatgtgaaatcagcgagataatgcgccagacgtgcacgcagcaaacggttatgaataaccccgccgctaaataccagcgtagtgataccacgcatcgtggcctgctcacgcatcaacgcggcaaaaccctgcgccagcgcatcatgaaacgcccacgcgcgttgattaaccggtgcctgccagttcagccactgctgccagaaagtggcgagatccagttgattgtccacccgcggcatcgtcaccggatgcgtcactccgtcgcatgaggctgctagcgcctccagagcacaagccgcttcaccttcataacttaacgtggctggcgcacagcccagtgccgccgccacagcatcgaacaaacgcccacacgatgacgccagcggcgcgttaattccacgctcaatggcccgcgccagtacnctccagttttgctgttgcacacttgccgtttcagggtaattctgccactccggcacaaagcgcaggcactgcnccagcaggttacgccacggctgcttcgccgccaaatcgccacccggaagcgccactgcaggcaagccgcccaggtgctcacattcgcgatagttcacccgcaggcactcgccgccccacaaagcgccgttctcccccataccgataccgtcgagcgtcaaagcaatgacatcaccgccatccagcggccactgatgctctgccagacacgccgctgcgtgggcatgatgatgcagcaccgtttgcgtcggcagattcatttcgctcgcccactggcaggagacatagcccggatgtgcgtcatgcacaacgtattgcggagtgaaattgtagatgttttgcatcaggcgtaacgcttcgcgccactgcgtctggatgccatcgtcacttaaatcgcccagatgctggctcaacaccacttgttcaccgcgcaccaggcagaaggtatttttcagatccgcgccgagacacagtacaggcggaacatttttaaagcccggaggcaaagccagcgcatccggcacatacccccgcgaacggcgcagcatttcgccgctttcgcgcaccaccgaatcatccatccgctgcacaatgtcgcggttgtgtattaagaatccgtcggcaatgccctgcaaatcctccagcgcctgttcgttgctgatagccggtggtttaccgctcaggttgccagaggtcatcaccagcgggcattgtagttcctgtaacagcaaatgctgaagcggattcgcaggcaacattaccccgacttcgttaaggccaggggcgatatcatcacaaagctcaggaacgtattttttatccaccagcacaatcggcgcggcgggcgtggtaagcaactggcgcgcagcgtctggtaaaccgtcagccactggcaacatgactgccagcggtttcgccgggcgatgtttgcgcgcccgaagtgtcgccaccgcgttactgttacgtgcatcgcaggcaagatgaaatccgccaatccctttgatggcgacaatgttgcccatttttaactgtgcgatagccgcctgtaatgccgcntcttgttctgcatgttcaccatgacttacccattcaagatacgggccacactccgggcaggccaccggctgggcgtggaagcgacgatcgagcgggtcgcggtactctttatcacaggctggacacagcggaaacgccgccatcacggtaaacgggcgatcgtaaggcatggcgcgaataatggtgaagcgcgggccgcagtgggtacagttgataaatggataacgataacgccgttcgcctggggtattcatttcggcaaggcaagcagggcaagtggcggcatcgggaacaatttgcgtattcatggcgccgcccgcgctctggcggatggtgaactcagtgggcagttgtgaccagataaacggttcacgctcaacgctatcaatacgcgccagcggcgggcagtgctgatgcaattgaacaagaaacgtttccgggtcttccagcagccggacttctacgccatcgccgtcattacagacatcgccgtgaagatttaattgctgtgccagctgccagacaaacggacgaaaaccgacgccctgcactttgcctcgaatacgcagttggacaccgcaagatgtgttttttgccattgagttattcccgccatcatgaattgcgtaacccgtccagccggacacgacagcgtcgcatccggcagtcacaggtcggcgataccgcccgctccgtattctacgaatatttccgggaattcctttgatgccagaacagttctgtaagatttttagaacatcagcgccgtacggcggcgtttttctgcgctcagttgttcaagtttattgcgatcgacacaaattagcgcatgggtcgggcaagccgccatacacgccgggccgtnttcacgatggttgcacaggtcgcatttattggcttcggctttgtcagcccgtacattcagccctgcgccgctgttgcgaatcaccggacgtaccaccacttccatcgcgccatacgggcaagccacaacgcaggttttgcaaccaatgcaacgttcctgcatcacatgaacaaaccctttaccacggctgatagcaccattcgggcagacgttagcgcacggtgcatcttcacactgacggcaaactgtcgccgtggaaatgttcacacctttaatgacatggatacgcggtaaaaatgtttccggggtcagcgatgcacagtcctgattttcctgatgagaaaccacgcacgccacttcacaggtacggcaaccaatacatttactcgcgtcagcaatgatgaaacggttcatcaaattctccagcaatgacagttaatgcgccgatacattcacaaatcatgccagtttttaatttgctgttatttaagg

SEQ ID NO: 1459 - DNA, 354 bp, Escherichia coli
  Strain O55:H7
aatttctgtaatgcaggaaaaaagatgtcatcgacactagtgacgatgacatgtgatgacaatgtttatcgcgaaagagcaatgagtgagtcgcggcggatcagttttccgctgaaggttttcggcggtgagaaatccccgccatcgagcataaaaatcagccgtccaataatttcctgaatcatctcagtcaccggaatttttacgctggagagcgccggaacgatatagggggcaattgcgatatcatcgaatccgataactgacacctgctctggcaccgctacgccgcgcttgtgtaacgctttcatcgcacctatcgccatatcgtcgttactggcaactaacgcgcta

SEQ ID NO: 1460 - DNA, 12708 bp, Escherichia coli
  Strain O55:H7
  modified_base (2)..(3): a, c, g or t
  modified_base (340)..(343): a, c, g or t
  modified_base (983)..(983): a, c, g or t
  modified_base (4572)..(4572): a, c, g or t
  modified_base (4726)..(4726): a, c, g or t
  modified_base (6045)..(6045): a, c, g or t
  modified_base (6458)..(6461): a, c, g or t
  modified_base (7734)..(7734): a, c, g or t
  modified_base (7868)..(7868): a, c, g or t
  modified_base (8082)..(8082): a, c, g or t
  modified_base (8914)..(8914): a, c, g or t
  modified_base (9626)..(9626): a, c, g or t
  modified_base (10138)..(10138): a, c, g or t
  modified_base (11912)..(11915): a, c, g or t
  modified_base (12222)..(12225): a, c, g or t
anncccacgttcgagcaacgtttctaccccttcggccccgctggcgggcgtccatttaccgttagcgataagtttttcattgagcgcaataccatgctgcgccagcgcgtctttatatccggcaagacgttcaacgctggtgggggaatccatcgagccggtaagaaaagcaatctcctgatgcccggcgtttatcaactctgccacggcgttaaagctggtctgtttatgatcgcaccagacgctatggctgctatttttgcgcaggcggcgattaagcaccattatcggctgactgtgcgcgtcaatgatgtcatcgatctcatccacacttaaaaannnngggtaaatcataatggcgtcgcagcgcaaatccagcagatactgaatcgcctggcgctcttcttcggcgctgtgtttaccatctgccaatagcaactgccgccctttatcttccgccattcgcgcggcatgaaacagtaattcactaaaataaatgccgtggtaaagcgtgttagtcactaccagccccagcgtctgggtacttttcgccgacagattgcgcgccagcaagtttggacggtaaccgctctcttctaccgcctgaaacacgcgatctttagtctcctggctgacgtagccattacctgaaagcacgcgggaaacggtcgcttttgaaaccccggcgcgcttcgccacttccagcatcgtcgtcatcattttcatccctttacacgcaatcaacgcagtgtactgcaccgtttaccgattgtccttgcgcactcggcgggaaaaacattcaggtgaccggtttcacaaatataaaaaatgaacaattaaatctcttgcttatttggttacaactattcatgattttgtgaaaccggtttcttaattccgtttcagcatcggcatttttccgtcacgtcgactgataacaactacatcttccctactgataacaggataaaatccgatggccnaaaattatgcggcgctggcacgctcggtgatagcggcactgggcggcgttgataacatctcggcggtcacgcactgtatgacgcgtttgcgctttgttatcaaagatgatgcgcttatcgacagcccgacgttaaaaaccatccccggcgtgctcggcgtggtacgtagtgacaaccagtgtcaggtgattattggcaataccgtttcacaagcctttcaggaagtcgtcagcctgctgccgggagatatgcagcccgccctgcccgtgggtaaacccaaactcacgctgcgtcgcattggtgcggggatcctcgatgcgctgatcggcaccatgtcaccgctgatcccggcgattatcggcggatcgatggtcaaactgctggcgatgatcctcgagatgagcggcgtgctgacaaaaggatcgccgaccttaaccattctgaatgtgattggtgacggtgctttcttcttcctgccgctgatggtcgcggcttcggccgccatcaaatttaaaaccaatatgtcgctggcgattgccatcgcgggtgtgctggtacatccgagttttattgaactgatggcgaaagcggcccagggtgaacatgtcgaatttgccctgattccagtcaccgcggtgaaatacacctacacagtgatcccggcgctggtgatgacctggtgcctgtcatatatcgaacgctgggtggatcgcattacaccggcggtgaccaaaaacttcctcaagccaatgctgattgtgttgattgccgcaccgctggcaatcctgctgattggcccgattggtatctggatcggtagcgccatttcggcgctggtttacaccattcatggttatctgggctggctttcagtcgccattatgggcgcgctgtggcctctgctggtaatgaccggaatgcaccgcgtctttacgctaaccatcattcagaccattgccgaaaccggcaaagaagggatggtcatgccgtcagagatcggcgctaacctgtcgctgggcggttcatcactggcggtggcgtggaaaacgaaaaacccggaactgcgccagactgcgctggctgcggcggcatcagccattatggcggggatttccgaaccggcgttatacggcgtggcgatccgcctgaaacgtccgcttatcgccagtcttatcagcggttttatttgcggcgcggttgccggtatggcggggcttgccagccactcaatggcagcgccggggctatttaccagcgtgcagttcttcgatccggcgaatccaatgagcatcgtctgggtgttcgcggtcatggcgctggcggtggtgctgtcgtttatcctcacactgttgctcggctttgaggatattcctgttgaggaagcggctgccgaggcgcgaaagcatcagagcgcacaaccgaccgtcgccaaagaagtaagtcttaattgaggatgaaaatgtcagtatttccagaaggttttttatggggcggcgcgcttgccgccaaccagtctgaaggtgcgttccgtgaaggtggcaaaggactgacaacggtcgatatgatcccacacggcgagcatcgaatggcggtgaaactggggctggaaaaacgttttcagttgcgcgatgacgagttttatcccagccatgaggcgacgggtttttatcatcgttataaagaagatatcgccctgatggcagagatgggattcaaagtgttccgtacctcaattgcctggagccgcctcttcccgcagggtgatgaactgacgcccaaccagcagggcattgctttttaccgttctgtctttgaagagtgtaaaaagtacggtatcgaaccgctggtcacgttgtgccacttcgatgtgccgatgcagctggtcaccgaatatggctcctggcgtaaccgcaagctggtggagtttttcagccgctacgccaggacctgctttgaagcatttgatggtctggtgaaatactggctaaccttcaatgaaatcaacattatgttgcatagcccgttctccggcgcggggctggtgtttgaagaaggtgaaaatcaggatcaggtgaaatatcaggccgcgcatcaccagctggttgccagtgcgctagccaccaaaatcgcccatgaggttaacccgcaaaatcaggtgggctgtatgctggcgggcggtaacttctacccttacagttgcaagccggaagatgtctgggcggcgctggagaaagatcgggaaaacctgttttttatcgatgtgcaggcgcggggcgcgtatccggcttactctgctcgcgtattccgcgaaaaaggggtaaccatcgacaaagcaccaggcgatgatgagatcctgaaaaacaccgtcgattttgtctctttcagctattacgcctcgcgctgcgcctcggcggagatgaacaccaacaatagcagtgcggcgaacgtagtgaaatcgctgcgtaacccgtatctacaggtgagcgactggggctggggaattgatccactcggtctgcgtatcaccatgaacatgatgtacgaccgctatcagaagccgctgtttctggtggaaaacggcctcggcgcaaaagataaacttgctgccaatggcgagattaacgatgactatcgcatcagctatttacgcgaacatatccgcgcaatgggcgaagcgattgcagatggcattccgctgatgggctacaccacatggggctgtattgatttagtttccgcctctacgggtgaaatgagcaaacgctacggttttgtctttgttgaccgtgacgacgcaggcaacggcacgctgacgcgcacacgtaagaaatcgttctggtggtataaaaaagtgattgccagtaatggggaagatttagagtaggtaacctactgtcgcactaaccaggaaggcccgataagcgttgcgcatcgggcaatctggggtttgctatcagttctgattccctcatcaagaacatccctgtcctgattacttattgaaaaactactcttcttccaccgctaactgcgcgaagccgccgttcccttcccagccttccagtcgttgataaacggtttctaccgcatctttaatcggctgggtcatcgggtagtaaaagccgacgatatccggctggatgccgaggaaaatcacttcgccaatatcttctttcaactgatcgataaggtagttcaacggcatgttatgggtagtcatcataaacatctcggcgatatcatccgggtcgatgatgcggatttcgccggggtttagccccatatccgtggcgtcgacaatcagcagccgtgtcgggcgcagttcgcggatagcgacaatgtcgttttccggtgcgctaccgccgtcaatcaccacccagttacctttcggcgcggcggcgcacttttccgccagcagcggacctgcgccatcatcacccatcatgctattgccaacacagagtaaaacgtcagtcacgcagtctcctcaccatcaaatagatggcgttttcctgatgaatatcatgcagcatacttaacagcattgtactccattcctgctgctgcgaagtttgcgctgcccgggctntatcgaatgcattggccagcatcggcacatggttaatgtcgatgacgatctcaccatatttcggcacaccttccattttgcggcgggcttcgctgcccgcctccagagtggcaatccatgccagatattcatcccacgggcaggtgagcgccgnttccaggcaatcgataaccccaaggtggtgaccaatcgccaggctgtaatagaccacctgctgcgcctcggcgggcgtggcatcgttctcatcaataaatttacggctcagttgactgaacaccaccttttcactcatcggatacgcgcctcttcaacaacatgattcagatggctgacaatctcgttcagacgcggatcgttttccgcttccagccagcgtgcaacctgttcttcgccctgccctaactgtgtaaggtaatcatcggcaatctgacgaccgtaacgataacccgccagtcgacgtgcttcgcgatccactttcacacgcagcggctgcaccatatcgccatgcaggatctccgccggttgttcatcctgctcacccggcccacgggcgtgaattttctgctccagcaggccgagcgccattgcaaagccgtacagcgtggcggctggcgttggcgggcagccagggatataaacatccaccgggacgattttatccgtaccgccccacacgcagtagagatcgtggaagatcccgccgctgttaccgcaggcaccgtaggagatacaaattttcgggtccggcgcggactgccacgcacgcagcgcaggggatcgcattgcacgggtgaccgcgccggtaaacagtaaaatatccgcatgacgcggtgaaggaacgactttaatgccgaagcgttctgcatcgaacagcggcgacaaagtggcgaaaatttcgatttcgcagccgttgcagccgccgcagtccacgcggtaaacgtaggcagaacgtttgatttttttcagtaacgacgccttcatgctggcgatggattcatccaccgtcatcgggaccggaatgccgttggcgtcacgggggcctaataaattgctcatcagatggcctctttcatatggcgagtcagttcaatacggtcggacggcaccaggcatttctggcgcttacattccgggcaagtctcaaagctttcgcggtggttttccgcgcggctgtcgccattgtgcttaagcagcgcaatggcgtagtcgatctctttctggacggcgaaaggacgattgcagacgcggcagttgcacagcgcgaagcgggactgttgcaggaagtcttctttcttccacaccgccagttcgtactcttgcgacagtttgattgccgccgtcgggcagacttcttcgcagcgtccgcagaagatgcagcgcccgagattgaactcccacgccagctcaccggtggcgaggtcagtttcaaccgttaaggcgtttgacgggcaggcattgacgcaggccgcgcanccgatgcactgctgcgggttctgctctggcttaccacggaagtttttatcaaccgcaatcggttccagcggataagacgaggtcgccgtgccggttttgatgacttttttgataaaggtaaacatggcgattccttatttcagcggcgagtttttacgctcaatgctgtaacgctcgagttctttgtacggcaccactttgctctttttcttacgcacatcgaccacggtcatgcggtcggtacaggagtagcaagggtccagactaccgataatcagcggcgcatcagaaacggtgttgccgcgcagcatgtagcgcagggtcggccagttcgcgtaggtcgcggcacggcagcgccagcggtacagcttctggttgtcgccggtcatgctccagtggatatcatcgccgcnnnncgcttcggcaaagcccagcgcaaaacggtgcggaatgtaggtaaagccttccaccatcagcgggccgcccggcaggttatccagaccgtagtcgatcatgttcagcgcggtatagacttcgttaatacgcactttcagacgcgaaataacgtcgcagccctgctcgctgtggacttccattggcagcaggccataaccaacaaacgggtgatcggcgcgggtatcgcgggcgtgaccgctggcacggaccatcgggccgacgttactgaagtcgcgagcgatttccgggtccagacgaccaatgccgacagtgcgctgttccatgttcggcgtactcagcagcacatccaccagctcctgcacttcacgacgcatctgttgcgccagttgacgggtctggatcatgtcatctttcagcagatcgcgacgaatcccgccgatcaggttcaggccgtaggttttacgcgcaccggtaaggatctctgccattttcatggaggtttcacgcacgcggaagaactgcataaagccggagtcaaagccggtaaagtgacaggcgaggccgaggttgagcagatgcgagtgcagacgttctacctccagcagaatggcgcggatcatctgcgcacgttctggcacctgaatacccatcgcgttttccaccgacgtggtgtaggcggtgctgtgagcaaaaccgcagatcccgcacacacggtcagagaggaaggtcacttcgttataacccatgcgggtttctgccagtttttccatgccgcgatggacatagaacaggcggtagtcggcgtcgataatgttttcgccatcgacgaacagacggaagtggcccggttcgtcagaagtgacgtgcagcggaccaatcggcacgacgttgtttttcttgtcgcccagttcgttgatgaactcgtaggtttcagcatcggtggtcggtgccggacgctgacgataatccatgctgtctttacgcagcggataaagttcatccggccagtcatccggcagcaccagacgacgttcatccggcaaaccaaccggaatcaaaccgtacatatcacgtacttcacgctcgccccacaccgcagccggaacgcgcggcgtcacggaaggatactccggtttgttggcatcaacttcgacgcgaaccgttacccagcacttagtccccttctccatcgacagcacgtagtaaacggcgtaatgaccattcagtttgcgttcgtcgttaccaaaaagcaccgacagccagcccccctgnttgtagtagagaaactccaccacttccggcagatagttcacctttacggtgacagtcagctgatctttggtctgccaggcgtggtccagcacgacgcccggaaatgcctcattcagcgcggcgagataatgttnacctaatttttcttcagacatgctcaaactctctttaatcacgccgccagcaaggagacgaacgctaaaaatgcaaagccaaacccagcccaggtaatgcgcggagtaatatcaagacgcagacgggccatgctgttttcgaacagcgcgataaccaggacgccgaccaccagtttgacgatggcaatcaccaacgccagcagcagcccaccgncggtgaaggtttccatttgtccccacggaataaacaccccgacgaacatctgcagcaccaccaactgtttcaggctgataccccatttcatgacgccaaagccgctgccgctgtactcagagagcggaccttcctgcaactcctgctcggcttccgccaggtcgaacggcagtttgcccatttcgataaaagtggcgaacgcacaggcacaaagcgccagcaccagcgggatgctctggctcagcggccagtgataaacggtgtcggtgatgttgctgatgttggtggaactggcaacctgtgcggcaacccacagaccaagcagcagcatcggttcgaccagcacgccaagcatcgcttcacggctcgcgccgatagcggtaaacggactaccggtatccagaccagaaatggcaaagaagaaacgcgcgatggcaaagagatacagtaaggtgatcaaatcacccagttgcggcagcggagaaccgacggtcaccaccggcagcgcagtagcgatagtcagcatgacgcccaccatcacatacggcgtcaggcggaacacccagccggaggcatccgggccaacgctctggcgacccagcaatttgataatgtcgcgatactcctgcaacacgcccggcccgcgacggttatgcaagcgggcgcgcgccacgcgggtaataccggagagcagcggcgcaacggcaaatagcaccagcgcctgaattaacggatataaaacactcattctcaggctcctcgtgaaacaataatcaccaccagcaccgccagttcaaccagcgccatccggcggaacagcaacgcactgccntcgcactgccagcccggcaccagcgacaccggattcagccatttgcgcagtttcagcaccggcgcaaacgcctgtttcaccggcatggcaaaaccgtgggcggtaattaccattgatttttcatggtcgtagccgcacacccaggccgcgccgcgggaacgcgatggcaaacgatcgcctttgcaaatcgccataatgatgaatggcagcagcgggcaggcaatcagcagcaacgtgatcatcggttgagaaacggtggtgttagcaggttccagcggcagaggtacagcagcagagagcatcggcagcagccacggcgcagcaacaccgccaattacgcagcaaatcgccagtgccactacgcttacgctcatcaggagcggtgcacaggtggcgttttcggcttctttggtacgcggcgcgctgaggaacgtgacgccatagactttcgccatacacatcaccgccagcgcaccggtaattgccagacccacagcgagcagcggccccagcagacgggcaacaaacgcgccactattgctcagtttgaagaaggattgatagataacccattccccggcaaaaccgttcagcggcggcagtgcagccattgccatcagcccgactaacatagcgatggagataaccggcattttcttgccaataccaccgagtttttcgatatcgcgatgaccggtacggaaccagacgntccccgccccgaggaacagtacgcttttgaacaggctatggttaagcagatggtacagaccaccgaccaggccaagagcaatcagcgccggttgttcgagcgcgatacccgttacgccagcgcccagccccagcaggataatgccgatattttccagggtgtggtaagccagtagacgctggatattatgttccatcaacgcatacagaccgccgacaaacgcggtgatcataccgagcaccagcagcgcgatcccccaccacagcggtgcattaccgcccagcagtgacagggttaaaatgcccagcaggccaattttcatgactaccgtagaaaacaacgcggcagctggcgcagaggcgttcgcatgtgcctgcggcacccagccgtgcagcggaataatcccggccagcaggccaaagccaatcacactgagcagccagatatcggaaccgagcggcagctgttgcatacgcatatccagcaggcgcagatccagcgtgccgtaacgntgccacagcagccagcaagcaatcgccagcagcagagtgccaagacgccccagcgcaaaccacagtttgccctctttgctgttgctggtgaggaacaccgcacacaaggccatgacttcggccattaccacgaacatgccgaggttgctggcaatgacggcgcagacggcggcagccatcaacatattgatctgcaagccgttgcacttcacctgcgcgtggcgatgccagtcaatgttgtagaggctgacaaacagaccgcacagaccgagcgtaatcagccaaatcgcgttaagcggagagatttgcacatcgtagcttaccagcgacagcgcaccgctcacgccaaccgcgccagtcagtacagtgaagcccgcggctgccgtatacagactaccaaccgcgccgccaattccggctatccagccgcttagcgccttttgaaaagaaaagagaaatgccagaacagcggcggcgacaaaccacgccacgccgctattgatcagggaaattgcgctcatttagcctctccactttgagcctgctgaaacaaggtgagatcgccaaagtccgtgttaaaggtcagctcacgcttacgtttgctgacgcgggcgatatcggtgttatccaccagatgcagggctttagtcgggcacatccgcacgcaggccggaccttgttcatcaaagctacaaaggtcacatttgacggcgatcgcgcgaatacccggcacccagtcaagcagcgtactgatacgcgccggagcaggcggtgccggtggcgctttcggggtattggcatttgcaggaatatccagcggacggctgccggaaaattcaattgcgccaaacgggcaggcgatgccgcacagcttgcagcttacgcacaggctttcattcaactgcacggccccatcaacgcgggtgatggcgttaaccgggcagaccaccgcgcagggtgcatcttcacagtggtgacagagctgcggcgcagattctttttcatttagcatcactctcaggcgcggcattgattgcaggccgtgctggcgatgcgtctctgaacaggcggcctcacaagtgtggcaaccgatacagagcgtggagtcagcaattacaaaacgattcaccgggcattcctcaggtgattgtcatttttgacgaaaacatgccgatgaaatgtcattttcgacactcatcgacacgcccatccccaaacaggcgtaacgcctgcaaaacgggcaaagcctcagctcatgctgccgggctttgtccctttaccagttggcttaaattcaccggcacattgttttcaatagcggtgtataagctgtcgtaaacgccagcgattttttcgagatagtgttccagaacctgttcgcgatcgcggatgttgaccttgccatcaatcatgccgtcaatgctcagttgcgcctgcgcaatccgctgtttgtcttcgccatcttttgtttcgacgtaatactcgatggtgtggctgttaaagccatccgccagggtgacgtaaatacgaaaatgttcaaaaaggacgaaacagagttctttgtccggcgcgcagctcatggcgtgatgcaggcgcgctttcgataacgtgatcccctgaaccagcgaattgcagtagatgtgccactggtcctgtaggcgacgatgccgctgtgcgatgtaatcggctttctcgcttatttcccaaatagtcattgtcaggttacccgtttaacagagatgccagctttaagcattttttgtgccaacttttnnnntattattattaaagcgatttttaagattttggtgaatttcgtcgccgtgtcgacgtgtcatttcgacatcatcgacattattcactgcagggataatcaacactggcacaattattgcttgtagctggcaatagttaatgggaggcgatatgcacgaaataaccctctgccaacgggcactggaattgatcgaacagcaggccgcaaaacacggcgcaaaacgcgtaactggggtctggctcaaaattggcgcattttcttgtgtcgaaaccagctctcttgccttttgttttgatctggtttgccnnnncagcgtggcggaaggttgtaaactgcacctcgaagaacaagaggccgaatgctggtgtgaaacatgccaacagtatgtgacgctactgacccagcgcgtccgccgctgtccacagtgtcatggtgacatgctacagattgtggcagacgacggtttacagattcggcggatagaaatagaccaggagtgagcgatgtgtacaacatgcggttgcggtgaaggcaacctgtatatcgagggtgatgaacataaccctcattccgcgtttcgtagcgcgccatttgccccggcggcacgcccgaagatgaaaatcaccggcattaaagcgcctgaatttacccccagccagactgaagaaggcgacctgcattacggtcatggcgaagcgggcactcacgcaccgggcatgagccagcgtcggatgctggaagtcgaaattgacgtgctggacaaaaataaccgtctggctgaacgcaaccgcgc

SEQ ID NO: 1461 - DNA, 32222 bp, Escherichia coli
  Strain O55:H7
  modified_base (286)..(286): a, c, g or t
  modified_base (1029)..(1029): a, c, g or t
  modified_base (2655)..(2655): a, c, g or t
  modified_base (3376)..(3376): a, c, g or t
  modified_base (4691)..(4694): a, c, g or t
  modified_base (4777)..(4777): a, c, g or t
  modified_base (6483)..(6485): a, c, g or t
  modified_base (6487)..(6487): a, c, g or t
  modified_base (7088)..(7088): a, c, g or t
  modified_base (7658)..(7658): a, c, g or t
  modified_base (7728)..(7728): a, c, g or t
  modified_base (8148)..(8151): a, c, g or t
  modified_base (11384)..(11384): a, c, g or t
  modified_base (12137)..(12137): a, c, g or t
  modified_base (12695)..(12695): a, c, g or t
  modified_base (12725)..(12725): a, c, g or t
  modified_base (13395)..(13395): a, c, g or t
  modified_base (19555)..(19558): a, c, g or t
  modified_base (21462)..(21462): a, c, g or t
  modified_base (22191)..(22191): a, c, g or t
  modified_base (26810)..(26810): a, c, g or t
  modified_base (26822)..(26822): a, c, g or t
  modified_base (26945)..(26945): a, c, g or t
  modified_base (27828)..(27828): a, c, g or t
  modified_base (28783)..(28783): a, c, g or t
  modified_base (32220)..(32221): a, c, g or t
gcccgcaagcaactggtgctcaacctggtttccagcccaggttccggtaaaaccaccctgctgacggaaaccttaatgcgcctgaaagacagcgttccgtgcgcggttattgaaggtgaccagcaaaccgtgaacgatgccgcacgcattcgcgctaccggcacaccagcgattcaggtgaacaccggtaaaggctgccatcttgacgcacagatgattgccgacgccgcaccgcgtctgccactggacgataacggtattctgtttatcgaaaacgttggcaacntcgtatgcccggccagcttcgatctcggtgaaaaacacaaagtggcggtgctttccgttaccgaaggtgaagacaaaccgctgaaatatccgcatatgtttgccgccgcctcgctgatgctgctcaacaaagttgacctgttgccgtatctcaactttgacgttgagaagtgcatcgcctgcgcccgcgaagtcaatccagaaattgaaatcatccttatttccgccaccagcggcgaagggatggaccagtggctgaactggctggagacacagcgatgtgcataggcgttcccggccagatccgcaccattgacggtaaccaggcgaaagtcgacgtctgcggcattcagcgcgatgtcgatttaacgttagtcggcagctgcgatgaaaacggtcagccgcgcgtgggccagtgggtactggtacacgttggctttgccatgagcgtaattaatgaagccgaagcacgcgacactctcgacgccttgcaaaacatgtttgacgttgagccggatgtcggcgcgctgttgtatggcgaggaaaaataatgcgttttgttgatgaatatcgcgcgccggaacaggtgatgcagttaattgagcatctgcgcgaacgtgcttcacatctctcttacaccgccgaacgccctctgcggattatggaagtgtgcggtggtcatacccacgccatttttaaattcggcctcgaccagttactgcctgaaaacgttgagtttatccncggtccgggttgcccggtgtgcgtactgccgatgggcagaatcgacacctgcgtggagattgccagccatccggaagtcatcttctgtacctttggcgacgccatgcgcgtgccggggaaacagggatcgctgttgcaggcaaaagcacgcggtgccgatgtgcgcatcgtctattcgccgatggatgcgttgaaactggcgcaggagaatccaacccgcaaagtggtgttcttcggcttaggttttgaaaccaccatgccgaccaccgccatcactctgcaacaggcgaaagcgcgtgatgtgcagaatttttacttcttctgccagcatattacgcttatcccgacgctgcgcagtttgctggaacagccggataacggtatcgacgcgttcctcgcgccgggccacgttagtatggttatcggcactgatgcctataattttatcgccagcgattttcagcgtccgctggtggtggctggtttcgaaccccttgatctactgcaaggcgtggtcatgctggtggagcagaaaatagcggcccacagcaaggtagagaatcagtatcgtcgggtggtaccggatgccggtaacctgctggcgcaacaggcgattgccgatgtgttctgtgtcaacggcgacagcgaatggcgcggcttaggcgtgattgaatcttctggcgtgcacctgacgccggattatcaacgattcgatgccgaagcacatttccgcccggcaccgcagcaggtctgcgatgacccgcgcgcgcgttgtggcgaagtcttgacgggcaaatgtaagccgcatcaatgcccgctgtttggtaacacctgtaatcctcaaaccgcgtttggtgcgctgatggtttcctccgaaggagcgtgcgccgcgtggtatcagtatcgtcagcaggagagtgaagcgtgaataatatccaactcgcccacggtagcggcggccaggcgatgcagcaattaatcaacagcctgtttatggaagcctttgccaacccgtggctggcagagcaggaagatcaggcacgtcttgatctggcgcagctggtagcggaaggcgaccgtctggcgttctccaccgacagttacgttattgacccgctgttcttccctggcggtaatatcggcaagctggcgatttgcggcaccgcgaatgacgttgcggtcagtggcgctattccgcgctatctctcctgtggctttatcctcgaagaaggattgccgatggagacactgaaagccgtagtgaccagcatggcagaaaccgcccgcacggcaggcattgccatcgttactggcgatactaaagtggtgcagcgcggcgcggcagataaactgtttatcaacaccgcgggcatgggcgcaattccggcgaatattcactggggcgcacagacgctaaccgcaggcgatgtattgctggttagcggtacactcggcgaccacggggcgactatccttaacctgcgtgagcagctggggctggatggcgaactggtcagcgactgcgcggtgctgacgccgcttattcagacgctgcgtgacattcccggcgtgaaagcgctgcgtgatgccacccgtggtggtgtaaacgcggtggttcatgagttngcggcagcctgcggttgcggtattgaaatttctgaatcagcgctgccggttaaacctgccgtgcgcggcgtttgcgaattgctgggactggacgccctgaactttgccaacgaaggcaaactggtgatcgccgttgaacgcaacgcggcagagcaagtgctggcagcgttacattcccatccactggggaaagacgcggcgctgattggtgaagtggtggaacgtaaaggtgttcgtcttgccggtctgtatggcgtgaaacgaaccctcgatttaccacacgccgaaccgcttccgcgtatatgctaataaaattctaaatctcctatagttagtcaatgaccttttgcaccgctttgcggtgctttcctggaagaacaaaatgtcatatacaccgatgagtgatctcggacagcaagggttgttcgacatcactcggacactattgcagcagcccgatctggcctcgctgtgtgaggctctttcgcaactggtaaagcgttctgcgctcgccgacaacgcggctattgtgttgtggcaagcgcagactcaacgtgcgtcttattacgcatcgcgtgaaaaagacacccccattaaatatgaagacgaaactgttctggcacacggtccggtacgcagcattttgtcgcgccctgatacgttgcattgcagttacgaagaattttgtgaaacctggccgcagctggccgcaggtgggctntacccaaaatttggtcactattgcctgatgccactggcggcggaagggcatatttttggtggctgtgaatttattcgttatgacgatcgcccctggagcgaaaaagagttcaatcgtctgcaaacatttacgcagatcgtttctgtcgtcaccgaacaaatccagagtcgcgtcgttaacaatgtcgactatgagttgttatgccgggaacgcgataacttccgcatcctggtcgccatcaccaacgcggtgctttcccgcctggatatggacgaactggtcagcgaagtcgccaaagaaatccattactatttcgatattgacgatatcagtatcgtcttacgcagccaccgtaaaaacaaactcaacatctactccactcactatcttgataaacagcatcccgcccacgaacagagcgaagtcgatgaagccggaaccctcaccgaacgcgtgttcaaaagtaaagagatgctgctgattaatctccacgagcgggatgatttagccccctatgaacgcatgttgttcgatacctggggcaaccagattcaaaccttgtgcctgttaccgctgatgtctggcgacaccatgctgggcgtgctgaaactggcgcaatgtgaagagaaagtgtttaccactaccaatctgaatttactgcgccagattgccgaacgtgtggcaatcgctgtcgataacgccctcgcctatcaggaaatccatcgtctgaaagaacggctggttgatgaaaacctcgccctgaccgagcagctcaacaatgttgatagtgaatttggcgagattattggccgcagcgaagccatgtacagcgtgcttaaacaagttgaaatggtggcgcaaagtgacagtaccgtgctgatcctcggtgaaactggcacgggtaaagagctgattgcccgtgctatccataatctcagtgggcgtaataatcgccgcatggtcaaaatgaactgcgcggcgatgcctgccggattgctggagagcgatctgtttggtcatgagcgtggggcttttaccggtgccagcgcccagcgtatcggtcgttttgaactggcggataaaagctccctgttcctcgacgaagtgggcgatatgccactggagttacagccgaagttgctgcgtgtattgcaggaacaggagtttgaacgcctcggcagcaacaaaatcattcagacggacgtgcgtctaatcgccgcgactaaccgcgatctgaaaaaaatggtcgccgaccgtgagttccgtagcgatctctattaccgcctgaacgtattcccgattcacctgccgccannnngcgagcgtccggaagatattccgctgctggcgaaagcctttaccttcaaaattgcccgtcgtctggggcgcaatatcgacagnattcctgccgagacgttgcgcaccttgagcaatatggagtggccgggtaacgtacgcgaactggaaaacgtcattgagcgcgcggtattgctaacacgcggcaacgtgctgcagctgtcattgccagatattgctttaccggagcctgaaacgccgcctgccgcaacggttgtcgctcaggagggcgaagatgaatatcagttgattgttcgcgtgctgaaagaaactaacggcgtggttgccgggcctaaaggcgctgcgcaacgtctggggctgaaacgcacgaccctgctgtcacggatgaagcgactgggaattgataaatcggcattgatttaactgcaaattgccggacagatctgcctgtccggcatactattcacgaggttttttcggacgatatttttccggcagttctggcaccggacacttgtcatcgatgagatgacgcacggttaagatcggatgacgccacagcattctcggcccggcccaacgcataatctgtttcatctcttcacgctttgcaggctggtaacagtgcaccggacactgcttacaggctggtttctcttcgccgaacacacatttatccagccgcttttgcgcgtaaacaaacaacgcctcgtaatgctccggctccgctgacgcctgcgggcatttcgcttgataaagatcgatcatttttttaatcgtcagtttttcacgagagatacgcttgccggacatactgcctccacctcattaagatgcatttatattacaacttaatcttaaagggcactatgactctaaagaagaagggttagccaaccgatacaattttgcgtacttgcttcataagcatcacgcaaaagctgcaaaacagcatctttcccggaaccagcatcaagaactcgccgttcgcttcttcccctgaaatgattaactccggtatcatgtgcgccttatgtgattacaacgaaaataaaaaccatcacaccccatttaatatcagggaaccggacataaccccatgagtgcaatagaaaatttcgacgcccatacgcccatgatgcagcagtatctcaagctgaaagcccagcatcccgagatcctgctgttttaccggatgggtgatttttatgaactgttttatgacgacgcaaaacgcgcgtcgcaactgctggatatttcactgaccaaacgcggtgcttcggcgggagagccgatcccgatggcggggattccctaccatgcggtggaaaactacctcgccaaactggtgaatcagggcgagtccgttgccatctgcgaacaaattggcgatccggcgaccagcaaaggtccggttgagcgcaaagttgtgcgtatcgttacgccaggcaccatcagcgatgaagccctgttgcaggagcgtcaggacaacctgctggcggctatctggcaggacagcaaaggtttcggctacgcgacgctggatatcagttccggtcgttttcgcctgagcgaaccggctgaccgggaaacgatggcggcagaactgcaacgcactaatcctgcggaactgctgtatgcagaagattttgctgaaatgtcgttaattgaaggccgtcgcggcctgcgccgtcgcccgctgtgggagtttgaaatcgacaccgcgcgccagcagttgaatctgcaatttgggacccgcgatctggtcggttttggcgtcgagaacgcgnnncncggactttgtgctgccggttgtctgttgcagtatgcgaaagatacccaacgtacgactctgccgcatattcgttccatcaccatggaacgtgagcaggacagcatcattatggatgccgcgacgcgtcgtaatctggaaatcacccagaacctggcgggtggtgcggaaaatacgctggcttctgtgctcgactgcaccgtcacgccgatgggcagccgtatgctgaaacgctggctgcatatgccagtgcgcgatacccgcgtgttgcttgagcgccagcaaactattggcgcattgcaggatttcaccgccgagttgcagccggtactacgtcaggtcggcgacctggaacgtattctggcgcgtctggcgttgcgtaccgctcgcccacgcgatctggcccgtatgcgtcacgctttccagcaactgccggagctgcgtgcgcagttagaaactgttgatagtgcaccagtacaggcgctacgtgagaagatgggcgagtttgccgagctgcgcgatctgctggagcgagcaatcatcgacacaccgccggtgctggtacgcgacggtggtgttatcgcatcaggctataacgaaganctggatgagtggcgcgcgctggctgacggcgcgaccgattatctggagcgtctggaagtccgcgagcgtgaacgtaccggcctggacacgctaaaagttggctttaatgcggtgcacggctactacattcaaatcagccgtgggcaaagccatctggcacctatcaactatatgcgtcgccagacgctgaaaaacgccgagcgctacatcattccagagctaaaagagtacgaagataaagtcctcacttcaaaaggcaaagcactggctctggaaaaacagctttatgaagagctgttcgacctgctgttgccgcatctggaagcgttgcaacagagcgcgagcgcgctggcggaactcgacgtgctggtgaacctggcggaacgggcctataccctgaactacacctgcccgaccttcattgataaaccgggcattcgcattaccgaaggccgccatccggtggttgaacaggtgctgaacgagccatttatcgccaacccgctgaatctgtcaccgcagcgccggatgttgattattaccggtccgaacatgggcggtaaaagtacntatatgcgccagaccgcactgattgcgctgatggcctatatcggcagctacgtaccggcgcaaaaagtcnagattggcccgattgaccgtatctttacccgcgtaggggcagcggatgatctggcttccgggcgttcaacctttatggtggagatgaccgaaaccgctaatattctgcataacgccaccgagtacagtctggtgctgatggatgagattgggcgcggaacgtccacttacgatggtctgtcgctggcgtgggcgtgcgcggaaaatctggcgaataagattaaggcgttgacgctgtttgccacccactatttcgagctgacccagttaccggagaaaatggaaggcgtcgccaacgtgcatctcgatgcactggagcacggcgacaccattgcctttatgcatagcgtgcaggatggcgcggcgagcaaaagctacggcctggcggttgcagctctggccggcgtgccaaaagaggttnnnnagcgcgcacggcaaaaactgcgtgagctggaaagcatttcgccgaacgacgccgctacgcaagtggatggtacgcaaatgtctttgctgtccgtaccggaagaaacctcgcctgcagtcgaggcactggaaaacctcgatccggattcactcaccccgcgtcaggcgctggaatggatttatcgcctgaagagtctggtgtaataataattcccgatagtcttttgctatcgggaatattaacgataactgacgaatcaaataaaaataccctgtataataggaaagcttattttacagggtaaaaccatgccatctacacgctatcaaaaaatcaatacccatcactatcgccatatatgggtcgttggtgatattcatggtgaatatcagttattacaatcccgcttacatcaactctcttttttccccgaaaccgacttacttatttctgtcggcgataatattgatcgtgggccggagagtcttaacgtcctgcgcctgctaaaccagccctggtttatctccgttaaaggcaaccacgaagcaatggcgctggatgcgttcgcgaccggcgatggcaatatgtggcttgccagcggtggtgactggtttttcgatttaaatgattcagagcaaaaagaagctacagatctgttgctgaaattccatcaccttccacatattattgaaatcactaacgacaacataaaatatgtcatcgcacatgcagattatccggggagtgaatatctctttggtaaagaaatagcggagagcgaattactctggcctgttgatcgtgtgcagaaatcgcttaatggcgagttacaacaaataaacggcgctgattattttatatttggacatatgatgtttgataacattcagacgttcgctaaccagatttatattgataccggatcgccgaaaagcgggcggctgtcattttataaaataaagtaatgaggccgggtaaagcaaagccactacccggcactttttattagcgcttaccttccgccagcagcggcgggatgctcggcaccattggcgcgtcatcaatatctttctgcgtcatgcggaacgcttcgggataatgttcgcggctggtacggcgcagcggttcggtatcgcgccaggtataaaggcaatgctggcactgatataccgtccagacatctttcaccggcgatttcgccatcacttcaatctgttcatcggcacaacgtggacaaatcatcttgttctccttatttacgtgcggccagcatagcggtcagtttttcagcccaggctttggtttccggcaaatccaccaccggctggctgtagtgaccacggttgtccggggcgacaggcgtggtggcgtcgataatcagcttgtcggtgatccccgccgggcttgagccagggtcgagttccagcacggacatattcggcaactgcaccaaatcccctgccggatttactttcgaggagagcgcccacatcacctgcggcaggttgaacgggtcaacgtcttcatcgaccataatcaccatctttacgtagcccagaccgtgcggcgtggtcatcgcacgcaggcccaccgcgcgggcaaagccgccgtagcgttttttggtggagataatcgccagcaggccgtgggtgtacatggcgtttaccgcctgcacttccgggaactcggctttcagttgttgatacagcggcacacaggtggctggccccatcaggtagtcgatttcggtccacggcatgccgaggtacagcgattcgaaaatcggcctggtgcggtaagagactttatcgatacgcaccacggtcatgttacgcccgccggagtagtgcccgctaaactcaccgaacggcccttcgatttcgcgtttgcggctttcgataaccccttcgaggatcacttctgaaccccacggcacatcaaaaccagtcaatggcgcggtggcgatcgggtacgggctttcgcgcagcgcgcctgccatttcatactcagactgatcgtatttcagcggcgtggcgcccataagggtgatgatcggatcgttacccagggtgatggcaatcggcagatcttcaccgcgctcttccgctttatgcagatgcagggcgatatcgtgcatcggcaccggttgcaggccgagcttacgcttgcccttcacttccatgcggtagataccgacgttctgcttgccgaagttatccgggtcgagcggatcgcgggaaaccacgcacgctttgtcgagatagaaaccgccatcaccgtcgtttaaacgaaacagcggcaggatatcgaacagattaatctcgtcaccatcgacggtgttctgcgcccaggctggattggcgcggcgctccggggcgatcgggaagttatcccagcggcggataaactcatcaatctgttttttaaccggggtgtttggcggcaggcccaaggaaatcgcgtggttctgccaggaaccgatggtattcatcgccacgcgggcatcggtaaaaccgcgaatattatcaaaccacagcgccggtgcaccatcgccgatacgcccggtggcgttggcagcggcagccagatccggttccgcgttcacctcttcgctgattttcagtaactggccgtggtcatcaagcgcctgtaaaaagctgcgtaaatcatcaaatgccattattcattctcctgagaaaaattccgggcctgcggcaatccttgccagcgcctggcgtagggatgttcaaggccaaattgatccagcacgcgggctaccacgtggtggacaatgtcatctaccgtttcgggatggttataaaaggcaggcatcggcggcaccatcgccacgcccatgcgtgaaagtgcgagcatattttcgagatggatggtgctaagcggcatttcacgcggcaccagcaccagtttgcggccttctttgagcacgacgtccgccgcgcgccctaccaggccatcagcgtaaccagcgcggataccggcgagcgttttcatactgcacggaataacgatcatgccgtctgtacgaaaggaacctgaggagatggtcgccgcctgatccgccgggttatggctgaagtcagcgagggcagcaacatcgcgggcgctgtaaggcgtttccagttcaatggtggttttcgcccacttcgacatcaccagatgagtctcgacattcggcatctcccgcagcgcttgcagtaatgccacaccaagangcgcaccggtagcccctgtcatcccgacgatcagtttcattgcttactctcttaattgttcgtatacgaacattattattaaaatacgcctctgttctcattgcggcaagcactgaaaagtaacaacatccccttcgtcactgaaaaaccgctatgatagcggcagatagtttgcccggagtttacatggcgttacgaaataaagcgttccatcagttacgacagctttttcagcagcacacggctcgctggcagcacgagttacctgacctgaccaaaccacagtatgcggtgatgcgcgccattgctgataagcctggtatcgaacaggtggcactgatagaagcagcagtcagcaccaaagcaacgttggcagaaatgttggcaagaatggagaatcgtggcttagtcagacgtgaacatgatgccgctgacaagcggcgtcgctttgtctggctgactgccgaaggagaaaagatacttgctgcggcgataccgattggtgacagcgtggatgaggaatttttggggcgtttgagtgcagaagagcaggagctgtttgtgcagctggtgcgcaagatgatgaacacataggatgcaaattgccgggtaggacgctgacgtgtcttatccaggcgacaaaaacacaagcttcccaaacaaaagaaaaaggccagcctcgcttgagactggcctttctgacagatgcttacttactcgcggaacagcgcttcgatattcagcccctgcgtntgcaggatttcgcgcaaacggcgcaggccttcaacctgaatctggcgaacacgttcacgggtgaggccaatttcacgacctacatcttccagtgttgccgcttcgtaccccagcaaaccgaatcgacgtgccagtacttcacgctgtttggcgttcagctcgaacagccatttgacgatgctctgcttcatatcgtcatcttgcgtggtatcttccggaccgttctctttttcatcggccaggatgtccagcaacgctttttcggaatcaccacccagcggggtgtctaccgaggtaatgcgctcgttaagacgaagcatacggctgacgtcatcaactggcttatccagttgctctgcgatctcttccgcacttggttcatggtccagcttatgggacaactcacgtgcggttcgcaggtaaacgttcagctcctttacgatgtgaatcggcaaacgaatagtacgggtttggttcataatcgcccgttcaatcgtctggcgaatccaccaggttgcgtatgttgagaagcggaaaccacgttccgggtcaaacttntctaccgcacggatcagccccaggttgccntcttcgataaggtccagcaacgccagaccacgattgccataacggcgggcaatttttaccaccagacgcaagttactctcgatcatccggcggcgagaggcgacatctccacgcagtgcgcgacgcgcaaaataaacttcttcttcggccgttaacagtggtgaataaccaatctcaccaaggtaaagctgagtcgcgtccaacacacgctgtgtggctccctgcgataacagttcctcttcggccaaatcgttatcactgggttcctcttctactaaggccttttcgtcaaaaacctcaactccgttctcatcaaattccgcatcttcatttaaatcatgaactttcagcgtattctgactcataaggtggctcctacccgtgatcccttgacggaacattcaagcaaaagcctggttccgccgatttatcgctgcggcaaataacgcagcgggtttacggatttccccttgtaacgaatttcaaaatgcaagcgtgttgaactggttccggtgctacccatggttgctattttttgccccgccttcacttcttgttgttcccggaccagcattgtgtcgttatgggcgtaggcactcaggtaatcatcattatgtttgatgataatcagattaccgtagccgcgcagcgcgttaccggcataaacaangcggccatctgcggtcgcgataattgcctgtcctttgctgcctgcgatatcaatccccttgttgcccccctcagaagcgccaaaggtttcgatcactttgccctcagtcggccagcgccaggtggagataggcgtactggttgatgtactgctgacagtcggctcggttgtgcttgctgttggtaccgttacaggcgctgtgaccgtggtcgcagttggcttgttgttcggcaacattttgttagcactctgttcacccgaagactcagaatacgtaattgtcggttgcgacgcaacagcaacggtggaattttgtgcaggcttgatcacaactccttgctctgctgcgtcggcctgggtaatggcatttccgccagtgattggcgtaccggaagcattacccacctgtaaggtctgaccgacgttcagcgcgtatggtgcctgaatattgttgcgctgagcaaggtcacggaaatcgttgccagtaatccaggcgatatagaaaagcgtgtcgccttttttcacggtataggtactgccgctataactgcctttcggaatgttcccatactgacggttatagacgatgcgtccgttttccatctgtaccggctgctgagctactggctgcactggctggatttgcggttgttgagtagcctgaatttgtggctgctgcaccggctgaatttgcggttgctgcgctgtagacgtcgtccccattttcggcggcggcgtaatcaacataccagaattggtatgtgcaggcgcattgccattaacggagctgaccggtgccggtggatttgaagtgtcagaacagcctgccagccatagcgaaaccagtgacaaagccgcaatgcggcgaacggtgaattttgggcttcccgcgctcatttatcccccaggaaaaattggttaataaccagtgacataattaccgtgcaaggcaccatactgaacactggaaaagatgttcacgatacgctgacctgcggcaaaataaccaggaaaaatccaggtatttcctcacgttttaagccagctcacccttcactaaagggacaaagcgcacggcctccacggtatcgataataaattcgcctccccgacgacgcacccgtttcaaatactggtgctcctcccctacgggtaagacgagaatcccgccttcgtccagctgcgtcattagcgcagttggaatttccggcggtgccgccgtaacaatgatagcgtcaaacggcgcacgtgcctgccaaccttgccatccatcgccatgacgggttgaaacattatgtaaatcaagatttttcaggcggcgacgcgcctgccactgcaagcctttaatccgttcaaccgagcaaacatgctggacaagatgcgccaggattgccgtttgatatcccgaaccggtgccaatttccagcacccgcgactgcggcgtcagctcgagtaattcggtcattcgcgccaccatatacggctgcgaaatcgtctgcccctgacctatcggcaaggcgatattgtcccaggctttttgttcaaacgcttcatcaacgaatttttcacgcggcacggcggcaagtgcattcagcacctgctcatcctgaataccttgcgcacgtaattgatccagaagtgcttgtacgcgtctgcttaccattgcgtgccaactcccacgctgtttaaccagtctgaaaccacatcttgcgcgctatgcgcagttaaatccacatgcagcggcgtgatggagacatagccctcatctaccgcagcaaaatcggtccccggaccggcatcacatttaccgcccggcgggccaatccagtacagcgtattgccgcgcggatcttgctgcgggatcacctgatctgccggatgtcgtgtaccgcagcgcgtcacgcgaatacctttgatttgatccaagggtaaatccggaacattaatattaagaatacgcccggtgcgcagcggctctttacacagtgcgcgcaaaattgaacaggttaccgccgcggcagtgtcgtaatgtttatgcccgtcaagcgagacggcaagcgccggaaaacctaaatgacggccttccatcgcggcggctaccgtaccggaataaataacatcatcccccagattcggcccggcgttaattccggacacaacaatgtccgggcgcggacgcatcagagcattcacgccaagatagacgcaatcggtcggggttcccatttgcacagcaatatcaccattttcaaaggtaaacgtgcgcagggaggattccagtgtcagagaatttgaagcgccgctgcggttacgatcgggggcgaccacctgaacgtcagcaaactcacgcaaggctttcgccagcgtttgtataccgggtgcatgtaccccgtcatcattactcagcaatatgcgcataatcacctgttgtgttgataagttccctgacaacgctggttgcaaaactacccgccggaagccagaaacggatttctacggtgacgtcatcccaccaattccagcttaattgttgcggatacagcagcatcgctctgcgcgcggcttcaactttttcgcgcaccagtaaagcttgtaattcagtttctgcggcgagagctgcctgttcgaatgccagcgcttcacgctgagttccccattcaccactgcccggcaatgcggcggttatcatcagctctttatcgttgacgcgacgctgtaattccaccagttcttcggtggttgcaacaaaccagctaccacgtccggctaattgtagcgcatcgccgtcaacaacttgattaacgtctgcttttttgaggcgctcagcaacaatctgattaaacaacgcactgcgggctgccgacaaccaaaaactccgtttattgcgatcgcgcaccggagtattggtttgcgcccagcgcagcgcgccctgcaagttgctaccgccaatcccaaaacgttgggcaccgaagtagttcggtacaccttttacgcaaatatcgatcagacgttgttcaacgtcatcgcgattgctcacttcgcgcagaaccagggtaaaggcgttacctttcagcgcccccaaacgcagcttgcgcttgtgccgcgcatactccagcacctggcagccttccaattgaaaggcgctcagatcgggcatttccttgcccggcacgcgagcgcataaccactgttctgtaacagcatgtttgtctttttgcccagcaaagctgacttcacgggcatgaattttcaggaatttcgccagtgcatccgccacaaaacgggtattgcagccgtttttgaggattctaaccagaatatgctcaccttcaccatcaggctcaaagcccaaatcttccaccaccacaaagtcttccggattggctttcagcagcccggtgccttgcggtttaccgtggaggtaagtgagattatcaaactcaatcattttgttgccttaatgagtagcgccaccgcttcacaggcaatcccttccccacgtccggtaaatccaagtttttccgtagtagtggctttcacgttaacatcatccatatggcagccgagatcttcggcaataaacacgcgcatttgtggaatgtgcggcaacatcttcggtgcctgagcgatgatagtgacatcgacgttgccaagggtataacccttcgcctgaatacgacgccaggcttcgcgtagcagctcgcggctatcggcacctttaaatgccggatcggtatccgggaacagtttgccgatatcccccagcgccgccgcgccaagcaatgcatcggtcaacgcatggagcgccacgtcgccatcagaatgcgccagcaatcctttttcgtaaggaatgcgtacgccaccaatgataattgggccttcaccgccaaaggcgtgtacgtcaaaaccgtgtccaattcgcattatgtattctcctgatggatggttcgggtgaggtaaaactcggccagtgccaaatcctccgggcgcgtgactttaatgttatccgcacggccttcgaccaactgaggatggaatccgcaatattccagcgccgaggcttcgtcggtaatagtcgcgccttcatttagagcgcgcgtcagacagtcatgtaacagctcacgagggaaaaattgcggcgtcagcgcgtgccataagccgttgcgatcaacggtatgagcaatggcatttttgcccggttcggcacgtttcatagtatcgcgcactggtgcggctaggatccctcccgtgcggctggtttcgctcaacgccaacaatcgcgcgaggtcatcctgatgcagacaaggacgagcggcgtcatgcaccaatacccactgcgcgtcgccagcggctttcaaacctgccagcacggaatcggcacgctcatcaccgccatctacaacggtgatttgcggatgattcgccagaggaagttgtgcaaaacggctatcgccaggacttatggcaatgacgacacgtttcacccggggatgcgccagcagcgcatacaccgagtgttcaagaatggtttgattaccgattgagagatattgcttaggacattccgtttgcattcgacggccaaatccggccgccggaaccacggcgcaaacatccaaatgagtggttgccatgttaattcccgggctgatttatcgattgttttgccccgcagactgtgcgcgcttcgacgcgtcaggcaccagacgataaaaagtttcgcccggcctggtcatgctgagttcattacgcgcacgctcttcgagcgcctcctggccgccattgagatcgtcaatttcggcaaaaagttgatcgtttcgcgctttaagtttcgcgtttgtagcttgctgtgccgccacatcatcattgacgcgggtatagtcatgtataccgttcttaccgaaccacagcgaatactgtagccagaccagaatagccagcaacagcagcgttagtttacccatcctgccccctgaaaaacggcatcatcatcccatgcatccgaagacgactctacatcctctgttggggataccgcgacaacgcgggcaaatgtaccacatttgtccattgttacgtatacccagggcgtgcagaacataatctcattattagttacggtttgaattatgaacagaggagacaagaaagtacaaattagcccagtagccacataaacagtgcgccaaacataatgcctactgtcatcagggtgaaaacaatactgtagcgtagctttccgtccatcaatgaatgcagcgcaatccccaccactaccgcaacgggcatcagcgccagaaagaaaggccaggtgtagataaagaagaacagcgtgttagagccataaatcaacatcggcatcgccagcgcaaataaccaggagataaaaccgaccacggcaccaggcagtgaccatgtggtttcttcatcctcagtaaggctgtcgttatttgttagtgtaatgttatggctattacgcatatttgatcctgttactttgacgaaccgggcatggaaacccggtggtgtctcaggatctgataatatcgttctgtctcaacagatctaataattgctgtaccaaatttgttactaattgttcaccattgagatgaatttctgccgattcaggcgcttcgtaaacggaatctattcccgtaaagttgcgcagttcaccggcacgcgctttcttatataagccttttggatcgcgggcttcgcaaatcgccagcggcgtatcgacaaacacttcgataaagcgcccttctcctacgcgttcgcgaaccatctggcgttcggcgcggtgtggcgagataaatgcggtcagcaccaccagtccggcttcaaccatcaaattcgccacttcaccgacgcgacggatattctctttacgatcggcatcgctaaaaccgagatcgctgcataatccgtggcgaacattgtcgccatccagcagatacgtactgacgccgagtttatgtaacgcctcctccagcgccccagcgaccgttgatttaccggacccggagaggccggtaaaccacagcactacaccacgatgaccgtggtgtagctcgcgttgttgcacagtgaccggatggctatgccagacgacgttttcgtcatgcagcgccattatttctcccccagcaaatcgcgnnnnccccagtgtggaaagtggcggcgaaccagggcattcaattccagttcgaatgcactaaattcagatggcgcagcagttgcctggctaactggctcatgcaccataccggcacctacggtcacattgctcaggcgatcgataaaaatcagcccaccggtaaccgggttttgctgataacgatctaacaccagtggctcgtcaaaagtgagatccaccaggccgatgccgttcagcggcaggttttcaacttcgcgttgggtaaggttattaatatcaacctgataacgaatgccatcaacacgagaacgcgtcttcttaccggcaattttgatgtcgtaactctggcccggggaaagcggctgttccgccatccataccacatccaccgacgcgctctgcacagctggtaacgcttcgtctgccgccagcagcagatcgccacggctgatgtcgatctcatccgtcagcaccagggtgatagcttctccggcaaaggcttcttcgcgatcaccatcaaaagtcacgatccgcgcgacgtttgattccacaccagagggcagcacttttacacgttgcccgacttccacgcgaccggatgccagcgttccggcgtagccacgaaaatcgagatttgggcggttaacgtactgcaccgggaagcgcattggctgggcatccaccactcgctgaatctccacggtttccagcacttcgagcagtgtcggaccgctgtaccacggcatactttcactttgcgaagccacgttgtcaccttccagtgcggagagcggcacaaagcggatatccagattacccggcagctgcccggcaaaggtcagataatcttcacgaatacgggtgaacgtctcttcactgtaatccaccagatccattttgttgatcgccacgaccagatgtttgatccccaacagtgtggagataaaactgtgacgacgggtttgatcgagcacgcctttacgggcatcgatcagtaagatcgccagttcacatgtcgatgcgccagtcgccatattgcgggtgtactgctcgtgccctggagtgtcggcgataataaatttacgcttctcggtagagaaatagcggtaggccacgtcaatggtgatgccctgttcacgctcagcttgcaggccgtccaccagcagagccagatccagcttttcgccctgggtgccgtgacgcttactgtcattatgcagcgatgagagctgatcttcatagatttggcgggtatcgtgcagcagacgaccaatcagggtacttttgccgtcatcgacgctaccacaggtcagaaaacgcagcaggcttttatgttgttgcgcaatcatccaggcttcgacgccgccttcattggcgatttgttgtgcaagtgcggtgttcatcttaaaaatacccctgacgttttttcagctccatagaaccagcttggtcgcggtcaatcacgcgcccctgacgttcactggtggtggaaaccagcatctcttcgatgatctccggcagcgtttgtgcatttgactccaccgcaccggtcagcggccagcagcccagcgtacggaaacgcaccatccgttttttaatcacttcgcccggttgcaggtcgatacggttgtcatcaatcatcatcaacataccgtcgcgttccagaaccggacgttccgcagcgagatacagcggcacaatgtcgatattttccagccagatgtattgccagatatcctgctcggtccagttagagagcgggaaaacgcggatgctttcgcctttgttaatctgcccgttatagttgtgccacagctccgggcgctgatttttcgggtcccagcgatggaagcgatcacggaaagagtagatacgctctttagcacgggatttctcttcgtcgcggngcgcaccaccgaaggcggcatcaaaaccgtatttattcagcgcctgcttcaggccttcggtcttcataatatcggtatgtttcgcgctgccgtgcacgaatggattaatccccatcgccacgccttccgggtttttatgcaccagcagctcgcagccgtaggctttcgccgtacgatcgcggaactcatacatctcacggaatttccagccggtatcgacatgcagcaacgggaaaggcagcgtacctggataaaacgccttgcgcgccagatgcagcatgacgctggaatctttaccgatagagtagagcatcaccggatttgagaattctgccgccacctcgcgaataatgtggatgctttccgcctccagttgccgcaggtgagtaagtcgtatttgatccataaccgttcctttgcaataccgctattttcttgccatcagatgtttcgactatagggagcgtaagagaacgaatgaaattaccaattagaatgagtagttccttaacggaataacgatttggcaaagctaatatcaaaaagtgcttaaggcaccggatttcgggcgtttaggaagatttgaaattgttttagcgcagcggcagtttcatactatggcggtaaaaaaatttgcatggtatttaaggactcactatgttttccgcattgcgccaccgtaccgctgccctggcgctcggcgtatgctttattctccccgtacacgcntcgtcacctaaacctggcgattttgccaatacacaggcgcgacatattgccactttctttccgggacgaatgaccggaacacccgcagaaatgttatctgccgattatattcggcaacagtttcagcaaatgggttaccgcagtgatattcgtacgtttaatagccgatatatttataccgcccgcgataaccgcaaaaactggcacaacgtgacgggaagtacggtgattgccgctcatgaaggcaaagcgccgcagcagatcattattatggcgcatctggatacctatgccccgcagagcgacgcagatgcagatgccaatctcggcgggctgacgttacaaggaatggatgataacgccgcaggtttaggtgtcatgctggaactggcagaacgcctgaaaaatacgcctaccgagtatggtattcgatttgtggcgaccagtggagaagaggaagggaaattaggcgctgagaatttactcaagcggatgagtgacaccgaaaagaaaaatacgctgctggtgattaatctcgataacttaattgttggcgataaattgtatttcaacagcggtgtaaaaacccctgaagcagtaaggaaattaacgcgcgacagggcgctggcaattgcgcgtagtcatggaattgccgcaacgaccaatccgggtttgaataaaaattatccgaaaggcactggatgttgtaatgacgcagaaatattcgacaaagcgggcattgctgtactttcggtggaagcgacaaactggaatcttgggaataaagatggttatcagcaacgcgcaaaaacagccgcattccctgcgggaaatagctggcatgacgtaagactggataatcagcaacatattgataaagcacttcctggaagaatagaacgtcgctgccgtgacgttatgcggataatgctaccgctggtgaaggagttggcgaaggcgtcttgatgggttggaaaatgggagctgggtgttctaccgcaggggcggggaattctaagtgatatccatcatcgcatccagtgcgcccggtttatccccgctgatgcggggaacacagcggcacgctggattgaacaaatccctgggccggtttatccccgctggcgcggggaacactttatacacggatcctgtgtgccgtggaccgccggtttatccccgctggcgcggggaacaccacaaaccgcccatcttcccgattactgcagccggtttatccccgctggcgcggggaacacactaagcatacatatctgtttttaaacaaatttattccacatcaacaatctaccaactaaattcaaacatttccttatttttaaagaacacataacctattgattatcaacaggaagaaaagaaaccaaacgtaacccatccaaatccaccggaatacgtctgttttctccccaggtctgaaattcaaaacccgactcggtattggtcgcccaggccatcaccacatttccgcaaccagccagttgggtaatttgctgccagatcatctcccgaatacgttttgatgtatcaccaacatacacaccggcacgcacttccagtagccagattgcgagccgtccacgtaagcgcggagggacattttctgtaacaaccacgaccatgctcatccgccgcgcccccggtgaccactatcacccagcgtttcaggttcagggatggcaggcggtaacatatccggcgcgggttgtggtggttcaatttcacctgcagcaaggacttcctcaattaacggtattaatttgcccgttaacttagtgctacggaaaatatcgcgacaggctaatctgacttctttatcaggttctgcgggttgcctcgctgctatttcaaatgcctttggcacaaccgaatcaaatttaatgatatcggctatgtcataaacaaatgaaagcggtttgccactatgaataaatccaatagcgggcgcatatcccgcggctaatactgccgcttcagaaataccgtacagacatgatgtggcagcactgatgcagcgattcacaacatcgcctttttcccagtctttaggatcgtatttgcgaccattccatttcacaccatattgtttcgccagtaatgcataggtctggcgaacgcgggatccctcaattccccgtagctgatccactgaacagcgagctggcggtggctcacgaaaacgtaattcatacattttgcgcaccaccttcaggcgtagatcttccgttaaagccagctttgcctggtagagtaatttatctgcccgcgcccctccgggttgtccggaagagtaaacgcgaacgcccgcttcaccgacccagaccagcagtgttcccaccgtggcggccagatgcaccgccgcgtgggaaactctcgttcccggttcgagcataatgcaggcgaccgatcccaccggaatgtgcgtgcggatcccggttttgtcgatcagcacgaaagcgccgtccagtacgtcgatttgaccgtactggaggaagatcatagaggtgcgatcttttaacgggatcggactcagtggtacaaacgtcacacctctgctccgggtttgatcagcatcagaccacagccgaacgcgcggcttttgccatacccctgactgagacgttgcagaaataacccgggatcggtgaccgtaagcatccccgtataatccacgctactgaactggatcagttgccgggagttttcccgccgcagttgctgttgtcggtaggcatcaaccgaggtatccagcagtgtaaaaccgcttctctccccctgcgctgccagccagtccagcgccgcctgttgttgatgcaaccagacatcacttccttccgcctgccccctcacctgccgtttcgcctccatcagcagatcgtggcgcttgcccgctttacagattgttggattcgcccgcaggttgaaacaaagttgttgtccggtacgcagctcgggcacaaatgaccggcattcgatggtgaacgtttcactttccgccgggcgttcctgcgacagtacaaaaaagcgaaacgcgccctggagttcttcccgacgataaagaaattgcctttctttgccgccagggaagagatcccacagccactgatgcatcacatattccccgcgatccaccaaatgcagcaactgcgcaggcgaaagctggccggtatgtaaggttattcttgagaggtacatggttcctccttgctgagccacggcccctgattgatggtgcgttccccaaacagccactgctgacgatttaaaggaacatctcggcgacgtaatattttgctckcgaccaggccgtcgtgttccccttcccaccagcattcatcctgaagtttcgggagtgagactttcagttcgcggaaactatcctgatactgttggtatgcgttacgtaagacatcagacgcgttgccttcgagcagtaacggcgcaagtggtaacgccagcggatgactttttcgccccagataaagcggaaaaaccggatgacgtaaaccgtcctgcaactgttcaaggctgtaaggcgcatcgggggttgttgccaccgccaccatccaccaggcatcggtgtagtagtcgcgccgggagataatcgcgctcagaagatcaggggcgctcaactcttcgcgacggctgaaataacgcgctttacgcacctcttttggcatctggaccgtgtgataatcccgtgcccagcgcgggttacggctggcgcaaaccaccagtgaatagtggcggttaaacgcgtttaatcgttcggtatcatcacgccgaatccctaccccggcagccagcagccccagcaatgctgagcgcgaaggcagttcatgggtatgacgcacttcgccgggggcatcgacgccccaggatgccattggcccatgaagctgaaaaatcaaatattggctcattagccgccccttacgcgcagataaagtccagcacgtccttcatgcttccctgtttgttcatcacgtcaaagcttgcgcattcggtcttctgttcatagaccgtattcatattttcgcgaagcgttgtaatacgctgcaccgccacatctaactgccgggtgccattaatgggttcatagaaagccgccgccagagaacgtggttgttcggtgcctttttctgccagcgcccaggaggcgtaggcacggctggcaaagctgttctgtttgccggttggggagactttaagtgcggcttccgtaaaggcgcgcaaggtctgattagctaacgcttcgtcaccgccgaggttttcgaccagcagatctttatcgatgcagatataggtgtagaacagcgcagaaccgaatccggtttcaccaagatgcccggcaccggcatcttcagaagcctggcgcaaatcatcaacggcggtgaaaaaatcatcttcgacaatcgtttcactgacaccaaatgcatgcgcgacctggcaggcggcttcaacattaaattcgggtttattcgccagcatacgaccaaacatagcgatatctaccgccatgcgatctttacgtaacaaagcgagatcttcctcttttggcgcgcgcttttcttcggccagttgatgggccagcgctnttacggcgtcanattctgccgggctgatatggactaattgttcagtttcggcgttagtgagcggatcttttggttttttgtcgtttttagctttcccaagataatccgcaatttttgccgcccattcgatggctnttttctcttcgatgcctttctcaatcaggatagttgccgcctcacgcgcaatacgcccactgcgaataccaatatggcccgccagtgcctgttcaaaaagtgcagaagtgcgccacgcacgtttcagactttgcgaggaaacgcgcagtcgcgttgctccacccaggaccacggttttcggcgctccggtgtcatcacggttaaggttggctgcagggtaagcggttaacaaatgaagctgaataaatgtcgtcatgagatagtcctttattgattttgttcgttatcgacgtcgccagcctggtaatattccagcgcccagcggatacggataaattcggttggccgctgatgacggcggtgatgattgagcagatcgtcgctctcctggcaccagcggaagacaccctctgccagagagtcaagattaacggaaccgtttaataatctgactgcgcgacgtaactggcgcagtaattcatccggtgtttttactgccgacaggcgagtaaaacgcccctttgacattaccgccgccagctgcgcagcaaaaggcagccgttcatcaatggctttaacattagcgctaagtgcggctatcagcgccagtgcggtaatacgccattcaggttcatcctgccactttatttgtctgttcttcagaaacaggcgaaatccatccgtcagacaaacatcattaaccgtcgtactacgccgcagactggcacgttcgccgcgtttctcctgcaattcctcatgccatttgcgcagcgtggctttgtgctcctcttttacaatactcattcagcagcctcctgctttttctccctggcggctttagcactttgcttctccgccgatgttgtaaaatatttcttgcgcncggtcatgacgcgttccaaatcaacgggctcataaggattggtgaatacacgctcgtcaaaatcctgacgtgcgaataaccaaatttccttttgccatttgccgagtaattcatccgcatcctgaccttcttcaatttggcgcactaacctcaggaagcgatgctgagttttgttccagaagtcgatatccacaaaactgaaatcaccccttgcaccttttggatcggagaaccatgcttctttcaatgcactccgtaacagactcagaatccgtgaagccgtttgcgcagccagccgcagcttcggtatctggccttcttttttattgagcagcagcgggaaatggtgttcgtaccaacagcgcgctttcatgttgtcgaaatcataaccaaatccccacaggcccacttttgcctgtttcagactgctggcattaaagagtttcaccaccagcgcgggaagttccgtattgttttctgacttacccgtttcgataaggcctaaccagtcgcgccagattaaaccgcccggttgtggtttaacggagtaaaactcaccgccctctttaagtggtacacggtaaggcgttaagggatgctgccacatggcataattcgcaccgtaatttttggtagtcatcaaactcagaagcgcgtcactctgctcaccgcaaatatcgcagttgccgactgtcgtggtattaaaatcaatacgaatacgccgcggcattccccagtacgcctggagtttattgacctgatcatcggttaccaccgcaccggccagttcgctggtacgcgtcgggccaagccaggggaaaaccagatcgtcaaattttttgggtagcggtaagtcggcttcatcctgcggcatcacgttgagccacagtttgcgccacaagggggcttgttgattgccctgatactcctgcaattcaatcagagtcgtcatcgncccaccgccgcgtaaaccggtgcgatagcctttgccacctgacggcacatttaactgtagggagaacagagctaacgcagaacaatgagagcatacgtgttcagtcacgccacgcttaataaagtggtctttattaaacttcgttgtttgagcgccgggaatctcaggcagtagcgaagcgacctgaactttatcgcccatgagcacctcgaaatcctgcataaatgaaggtgaatctgggccaaactggaaagcgtgttctaatgacagcaatgcttcccgtagcttttcagcttccagcccgtcttcccagatatcatcccaacgacgataatcttttggcgcgaaactgctttgtagtaaccccagcaaaaactgccatgccgccccctggagatctgcccgcggcgcagcgatatcgacaacattttcatccgccagatcgactggcgccagcttgcctgttgttccgtctttaaaacgaacgggcaaccacggggttgtcagaagtgaaaacgagttcatatgtatcctctcgtaaaaaagaccatccctggtcggttgtccatcattccatccttttcggtgtatcaactattcagagagtcctgtcgcaggtatctcaatcaaccttgccaatcaatccctccctggccgaatacccgcaactttcgtcatcagtgactaaaatcacgtttgccatttccggatcttgccgctgttcaatgcaccactgcctgaacgcttccccttccagtaaagaaaactcatcccgatgttttttccaccagcttcgacgcactctgacaacgctcatttcccatgcgtgagcaccggtggcataaggcttcaccacaccggcaatacaggtagccagccacagggaaacagattcctcagccagacgtgtcgacagcttttccggaaggtaatcgttgatattggcggcatagccaggcttgaagttcaggacaaactttttagccattgcgcgatcgcagtaatatttgcccacttgctcctgctcgctgcgggcaaatccttccggcattaccacgtcctcaccgtagactgattcaataagaaggcgggctgcgtgtggcatttgaatagcgccttgctcacgcagtacacgctgcgtcagccagattcgtccatgatcgggatagacatatgcactgttacgcatggcactgccgaaccattcgtcaccaggagcgtcgtcccagacgggggccagaatcagcaattcaggaggggaacgctcgtcttttccgtcacgctttaactgaccattaatatcgcggatatgccgctgtaatcgccccgctcgctgaatcagcaaatcaacaggggccaggtcggagatcatttcgtccaggtcacaatcaacgctctgctctaagacctgagtacaaatgaggacttttccggcacgctgtgaaccgtcttctttaccaaagcgtgccagcgtctccatttcaattcgctggcgatcgctaaaagcaaagcggctatgaaagagtgaaaggctggaagcgggaatgacgccgcgggcaagcagctgacgatgaaccttaatagcgtcatcgacagaattccggatccaggcgatgcattttccctgacttaccgccgattcgatacgcgcaatactctcttgttcactatgaagccaacccacgctgacgctacgctcaacgtctttgcgcgtcgctacccggtgtgagttcacatcggatttcgtgacatgcgtcagccaggggtaatcatccttttcaaggaacggagcttcttgctggccctctgtgccacgcgcaaaggcggcgacgagtttgtcgcgctgctgttgggataacgtagcagaaagcaaaatgacgcagtttccgccacgcgcctgccgctcgatcagcccttcaagaatgcacgacatgtaagcatcacaggcatggatctcatcagccagcaggattttgttactcaaccccagaagccgcagattattatgtttaaacggcatcactgccatcatcgcctgatccagcgtgccgacgccaatttcagccagtagcgccttcttgttactgttggcaaaccaggccgcacatccctgactgaatgtttgttcatccggttcttctgacccgactaaatcaccggaccagagtgattcattgaagcggtccattaatgtgcgggcactgtgtgccagcaccaagctggggcgggactctggcgaatagaaagcaagccaggttttgaccagccgatcgtacatggcattggccgttgccattgttggcaggccaaaaaacaaaccctgtgctttcctcgcagccatcaacctgtgcgccaggataagcgccgcttctgttttacctgcgccagtcacgtcttccagaataaataactgtggccctggctggctgatatccagatccagtaccttttgctgtaatggtgtcgggtgctcaataaaaggaaacagcgtattaattccggtgaaaggtgcggtttctgcttttggaggaaagacggttaaggcgttttgagcctgaactaaagttttctgccagtaatctttaatatccattgggtgtgcgacgcgtggaaaaaatcgcgttgacgaacccgtccagtctgcgagtacgactgttgcagagatataccaggaaagttgttttaaaagttcaacgccctcgtcatcatcccagaatgtgggaatctctatgagcggaaacagtgccttgatttcaaggagaaaatctcgcgcggcagctttgtcttcaggcagaaaattatccagctcatcaatacggtcaggtggtcgaccatgatgcccggtagttatggacatccacatctctattacacgtgtaagtttacgagaagagagtgaagatgaaggaagcaactcctcacattcacttaaataataattccacagccagtaacccagcgttgaatgagagatcttttcgtaattctttctggaaccttccggaatcttgagttcaggggccaggtaaagttgctgaaaagagcgggcaaattttccaatatcgtgccagcacagcaaccaagcgaaaaattgagccgcctgttccttgtcagaaatccctaattgacgaaagtaatcagccagcccgaagcaatttcttttaaccattaaatagcccattgcggccacatccagcgaatgccagcaaagaaggtgatagccgtcgccaccctctttctcgccacgtcgggtttttccccagaaatcaaagaaagtcacaatatttttatccttcagtaaacttaaaggatatttacgcatattttaaaaattatctgtgatatatatcagccaataaacatttatattatgaataaattaatgattttcatttgaaattcataatgataaatagagactatatattcacataaanna

SEQ ID NO: 1462 - DNA, 25031 bp, Escherichia coli
  Strain O55:H7
  modified_base (2025)..(2027): a, c, g or t
  modified_base (3149)..(3149): a, c, g or t
  modified_base (3388)..(3390): a, c, g or t
  modified_base (4648)..(4651): a, c, g or t
  modified_base (6524)..(6524): a, c, g or t
  modified_base (7108)..(7108): a, c, g or t
  modified_base (14307)..(14307): a, c, g or t
  modified_base (14600)..(14600): a, c, g or t
  modified_base (16048)..(16048): a, c, g or t
  modified_base (16691)..(16692): a, c, g or t
  modified_base (17131)..(17131): a, c, g or t
  modified_base (17795)..(17795): a, c, g or t
  modified_base (18430)..(18430): a, c, g or t
  modified_base (20912)..(20914): a, c, g or t
  modified_base (21817)..(21817): a, c, g or t
  modified_base (22697)..(22697): a, c, g or t
  modified_base (22699)..(22699): a, c, g or t
tttaaaaaagggtgcaggagaccaaaccatcacaattcaatacgcggggttttacccccgcgtggtggctacttcttcgattcgtaagcgagaactgccttaaactccataccacgctctctgatactcaactcacataacgagtcgcctaccatgagcgtgaatcccagtactgtacaacacagtactatgattgccacaagggcatattttgttagcatgtcttgcctccctgcaaagaagagactaacatccgaattgctacgttcgaacgcgagcctcaggttgatagaaatatcgcctggggcttttgtccatctggaacctcgcgaatgcttaacgccagacagcctcaagcacccgacgccattctatacctgataattcttccagcggcgttcacgtttaaaatcaggaatgctgctcgcaaaataaaaacgcccccatcattactgacagaggcgtttaatttatccgacaatatttacccttcgtgtaacccacattccctttttaagccaaagaaacgcgtttcttcttccgccatgccgggttcccatttacgggttgtatgggtatcgcccaccgataaatatccttcgtcccataatgggtgatatttcaggccattcttttgcagatactgatatatcgttcggttatcccagtcgataatcggcagcactttaaatacgccacgctgaattgccagcaccggtaaattggcgcgactgccggattgttcacggcgcaggccagcaaaccaggtttgcgcgttaagttctttcagcgcccggttcatcggttcgactttgttgatgtcattgtacttttcaatgccttcaacgccctgttcccacagttttccgtagcgtgcttcctgccaggctgcgctttcggtagcacggtacactttcaggttgagcttgagtttgtccgttaactcgtcaataaagcggtaggtttccgggaacaagtaacccgtatcggtgaggatcaccggaatatccgggcgaatttgattcaccagatgcaggctcaccgccgcctgaatgccaaagctggaagaaagtacatattcaccgggcagattatccagcgcccaggctacgcggccttcagcgtccagtttttccagttgggcgttagtttccgccagcgccagaatgcgatctaccttcggcagttcgttcagggcgtttagatcgagtttggacatagattcctcactgtttgccttgcctgatgcgacgctcacgcgtcttatcaggcctacaagaccgggctgatggttaatcccacaaatcgcgcgccggatcgagcaccgggcgaatgatgcccgcacgcaccgtaaagtcgccgaagccttcacccgcttcgcgctctttcgcccagcgccctatcagttcatcaagcgacgccaggatttccggctcggtgatgttttctttatacatccgtgggatacgtgtcccaatgcggttgccgccaagatgcaggttgtagcgacccggcgctttacccaccaggcccacttccgccagcatcgcgcgaccacaaccgttcgggcagcctgttacacgcatcacgatatgctcatcgctgacaccatgtttcgccattaaattatcgatgttgtcgataaaagacggcaggaaacactccgcttccgccatcgccagcgggcaagtcgggaacgagacgcaggccattgagttttcacgctgcggcgtgacggcattcattaacccgctctctttggcgatcttctcgatcttcgctttctcgctttccggcacaccggcgatgatcagattctggttcgccgtaatgcggaaatcacctttgtggatcttcgcgatctccagcaggccggttttcagcggacgccccggataatcaaggatgcgaccattttcgataaacagcgtcaggtgccagttatcatcaatgcccttaacccagccaatacgatctccgcgtccggtgaactcatacggacggatcggttcaaatttgatcccnnngcgacgctccacttccgctttaaacgtctcaacccccacgcgctccagcgtgtatttggttttggcatttttacgatcggttcggttaccccagtcacgctgagttgtcacgacggcttccgccactgccagcgtatgctccagcggcagatagccaaactcactcgccgtgcgggcgtaggttttcttgttgccgtgttcgatagaaagcccaccgcccaccaacaggttaaagcccaccagcttgccgttttcggcgattgccacgaagttcatgtcgttggcgtgcagatcgatatcgttctgtggcgggatcactaccgtggttttgaatttacgcggcaggtaggtctggccgaggatcggttcttcatcggtggtggcgactttttcctgatcgagccagatctccgcatacgcgcgggtacgaggcagcagatgttcagagattttcttcgcccactcgtacgcttctgcgtgcagctgcgactcgtaagggttcgaggtgcagagtacgttacggttcatgtcgttagcggtcgccagcgcatcaagaccgaccgagtgcagcatctggtgcaccggtttgacgttctttttcagaatgccgtggaactggaatgtctggcggttggtcaggcgaatgctgccatagatggtgttttcaccggcaaatttatcgatcgcctgccactgtttggtggtgataactccacccggcagacggcagcgcaacagcatcgcatggcgcggctccagcttctgttcagcacgttcggcgcggatgtcgcggtcatcctgctgatacatgccgtggaagcggatcagcaggaagttatcgcccttaaagccgccggtcaggccgtcgtttaaatcttccgcaatggtgccgcgcaggtagttgctttcaagcttcatgcgctcggcgtctgtcagttttccttcgaccactaaaggccctggatgtttttcgctcattagtagacatctcgctgataacggcgctctacgcgcagctcacttaaaaattcatccgccgcttcggtgtccatgccaccaaattcggcaatcacttccagaagtgcctgctcaacgtctttcgccatgcgattagcgtcgccncagacataaatgtgggcaccgtcattgatccagcgccacagctccgcgccctgttcgcgcagtttgtcttgtacgtaaactttttctttttgatcgcgcgaccaggcaagatcgatacgcgtcagcacgccctctttgacgtaacgctgccactccacctggtagaggaaatcttccgtaaagtgcgggttgccaaagaacagccagtttttacccggcgcttcgtcagcggcgcgctnnngcataaaggcgcggaacggcgcgatgccggtgcctgggccaatcataatcaccggggtttccgggttagcgggcaggcggaagttatcgttatgttcgataaatacgcgaacttcgccctcttcttccacgcggtccgcgaggaagctggaggcaccaccggcacgggcgcggccttccacgtcgtaacgcaccacaccaacggtgacgtgtacttcgttctcgacttcctcctgcgaggaggcgatggaatacagacgcggcgtcagcgggcgcagcagattaatcagcgcttcggcgtccagttgcgccggagagaagcgcaccatgtcgacaatcggcgtagtcgcggcgtaatgctgtaacttcgctttatcgcccaccagcggcaacagcgtttcgctgcgggtaagcgtggcatagttctcaacaatattggcggtgttgacggtcagttcgaagtgccactgtagcgcttcgttcagaggcaacgttttgccctcgacggtgacaggttcatcgcctttcagccacagcagttcgacaagttctttcaccagtgccggatcgttctgataccagacacccagcgcgtcacccggctggtaacgcaggcccgagtcacctaagtcaatttcgatatggcgaacgtctttttcagagttacgcccggtaattttctggttaaccgaaaggctcgctaccagcggcgcgtctttgctgtacgggctggtgtggatttcatttaccacgccagtagcgacggattgcgaaggtgccgcgacaggcgcacgcgatttaagcgcatcaaccacgcgggcgcgccactcgctggcagcagcctggtattcaacgtcggcgtcgacacggtcgagcaggcgttcaccgcccagttccgccagcttgctgtcgaaatctttcccggactggcagaaaaattcataagaactatcgccgaggctaaacacggcaaaagcggtattttccagcttcggcgcttttttggagaacaggaacttatgcagcgcgacggcttcttccggcggttccccttctccttgcgttgacgtcaccacgataagcagtttttcgctggcgatttgtttgaatttatagtcgcccgcgttcaccagcttaacgttcagttttgccgtcaataaatcatcgcgtaatgcttcagcaacccggcgcgcattgccggtttgcgaagcagagataatagttatacccggcatttctgcggctggcgctggcgtcgnnnnaagcgcagcaggctgctgattgagcacgccccagaaatagccagaaacccaggcaagctgggtgggagttaaatcggtcgtggccgcctgaaggcgtgccagttgctccgggttcaacggaagcaacgcggaaggtgggacctgtgtcgtcatgcgtcgttatgttccagtaagcaaagctgtttctgcgccctgtcagcgcccataaaacagaagagaaggtaaggttaacggggtgaacggtgtggattaaagacgggatagcgataactaataaccaaatcgactaacctgttttagcaatagtctttaacaacaaaatagattaaccaacctaatgaaaaacaaatgaatttagccaatcattaagataaatcagcgattttgcgcaacaaagtcgttttagataatgcgaaaaaagagcctttccggtactctacggcggttttatcgtcctgtagagaaattatgatgtccaccacgttatttaaagatttcaccttcgaagccgctcaccgcttaccacacgtcccggaagggcataaatgtggtcgcctgcacgggcattcctttatggtgcgactggaaattaccggggaagtcgatccgcatacgggctggattatcgatttcgctgaactaaaagcggcgtttaagccaacttatgagcgcctcgatcaccattatctcaatgatattccaggtctggaaaacccaactagcgaagttttagcaaaatggatttgggatcaggttaaacccgttgtgccgctgttaagtgcggtgatggtaaaagaaacctgcaccgctggttgtatctatcgcggcgaatgataagagtgtggcggcggtcaatttcccttaagtaacgctatgttagggtgttgtgttcaggatatctggggcatgacatggaagacgactgcgacattattattattggtgccggtattgcaggcaccgcttgcgcgttacgctgcgcgcgagcgggtttatccgttttgttactggaacgcgctgaaatccccggcagcaaaaatctttccggcgggcggttatatacccatgcactcgcggaactcctccctcaatttcatctgaccgcgcctcttgaacgacgcatcactcacgaaagcctttccctgttaacgccggattgcgcaacgacgttttccagcttacagcccggcggtgaatcctggagtgtactacgtgcacggttcgatccgtggctggttgccgaagccgaaaaagaaggtgtcgaatgcatccctggtgcgacggtggatgcactgtatgaagaaaacggcagggtgtgtggtgtcatttgtggtgacgatattctccgcgcccgttatgtggtgctggcagaaggtgccaacagcgtcctggctgaacgtcacgggttagtgactcgtcctgctggcgaagcgatggcgttggggatcaaagaagtgctgtcgctggaaacatccgctattgaagaacgttttcatctggagaataacgaaggcgcagcgttgctgttcagcggcggaatctgtgatgacttacccggcggcgcatttctttatactaatcaacaaacgctctcgttagggattgtttgcccactctcttcccttacgcaaagtcgtgttccggcaagcgagctgcttgctcgctttaaaacgcatccggcagtgcgcccgcttatcaaaaacacggaatcactggagtatggtgcgcatctggtgccagaaggtggcttgcacagtatgccggtacaatacgccggtaacggctggctgctggtgggcgatgcgttgcgcagttgcgtcaataccggaatttctgtgcgcggcatggatacggcgctaactggcgcgcaggnggcggcacaaacactgataagcgcctgccagcaccgcgagccgcaaaatctgtttccgctttatcatcacaacgtagagcgcagcctgctgtgggatgttctacagcgttatcagcatgttccggtgcttttgcaacgcccgggatggtaccgtacgtggcctgcgttaatgcaggatatttcccgcgatttatgggatcagggtgataaacctgttccaccgctgcgccagttactctggcgtcatttacgtcgtcatggcttgtggaatctggcgggcgatgttatcaggagtgttcgatgtctgtagcccgtaatctctggcgcgctgctgatgcgccgcacattgttccggctgactccgttgagcgtcagatggtacaacggttgattaacgcctgtccggtaggtcttttttcgctcacaccggaaggtgacttacgcgttgattatcacggctgcctggggtgtggcacctgccgtttgctgtgcgacgaatccacactacaacagtggcgctatccgccttccggattcggcatcacctaccgatttggataaataataaggataatttatgcccntcttacacctgctccgccagaatccggtgattgctgccgttaaagataatgccagcctgcaactggccatcgattctgaatgccagtttatttccgtcttgtacggcaatatctgcaccattagtcaaatcgttaaaaagattaagaacgctgggaaatatgcttttattcatgttgatttgctggaaggcgcgtcaaataaagaagtggtgattcagtttttgaaactggtgaccgaggcggatggaattatcagcaccaaagcatcgatgctaaaagcggcaagagcggaaggttttttctgtattcatcgcctgtttattgttgattcgatttcgtttcacaacattgataagcaagttgcgcaatcgaatccggattgtattgagatcctgccaggctgcatgcccaaagtgctgggctgggtgacggaaaaaatccgccaaccgctgattgctggcgggctggtatgcgatgaagaagatgcgcgtaatgcgattaacgcgggtgtcgtggcgctttccaccacgaataccggagtctggacgttagcgaaaaaattgctttgacgggataatcgtaaccaattgaatttggtttgatttgtaggccgcacgccacatccgacattcagcgcctgatgcgacgcttaacacgtcttatcaggcctacaggtccccagtccagaaccgtaggcaggatcatccggcagcacgttattggcattctgcgtcaatgtttgtcaccagtgcctccagcatcactttccagtcatcaaccacgccaacatctgcctgtgaaaataccgctgcgctggcgtcatgattaatcgccaccacaaacttgctattgcgtacgcccgccattaacgctgctgcgccagaagcgccaacaacaatacacacctcaggtgccagcagatgtccggaaataccaatcactttttcagcatcaacgccaccgttcatcactcgcgcccgactgtagcccacttcggctcccagcttttatgccagcatagcgatttcctggttatctgcctctccgccctgccccaccaccaacacccgtctggcctcagctaatgggtcgcgggtaacatttttcaggttctctatgctaaccagccagtccggaagcgcacctgggactatgttcagttgctgcataccagagggcaacgtggcatttttatctgctcccgcctggcgcgccagggaaagacatagcgggcgtttttctgtttgcagcgtcgccgttagcgcatttccccagtgggatttgcgcacgcttacgattggaatctctaacgaagtcacctggcagatgcttgcaccatgtaaacgccaggccagccgagtcgacagttcatcgccaaacgttcccggcggaaagagaacaacgttcgcaggcgttcgctgccactgttccaccagcgcatccagcacctgttccaccactacgggctgtggttctatttgccagtgcgccagggtacaaccgctgaaatcctgcgccgccagccagcccgctaatgcggcattctcctgatttattgtcacaattgcgatattcatggctgcatcctttggcgtaaatagtcctgccatagcttttgcgctttttctgctaccgtttgcccatcaatcagcgtcgctccgcgtcgttgctctgctcttgccagttgcagacactgcatcgctggcaattcggcagcaacagttttacggataatttccgctttccccgcagccattcgctggcgcattcccggtactggcaaggccacttcaccgcactgacgcacggcaatcaccgtaggcaagcgaatccgacaacagcgcagcccatgttcagtacgctgttcgagggtgataaacggcgcgtcgagagtgaaacgctccacctgggtgaagcaaggccagcccagcatttccgccagcaaaaatggcgtttgcccattctgcccttcgctgctttggcagccggtaattatcagatccagcggattctgacgctgccattcggcaatatggcgagcgacaaattccgacgcaaagcgcagatctgccgccgtctccagcaatacagcttcctcaaacccaagagccatgagatagcgcagccagtgcaacgcccgttcatcccccatgctcaacgcggttaaagacatcggcgtaccgttttttctctgcgccaacagcagcgcggcggcagcctgttcatcagcaccgagtaaacttcgcagtagcgaaatatccggtccgctattaccatgagccgccgcctgccactctttttccgccagcattccggcatccggttcggctttaaacgctaacagaatgttcattcgcacctcctacatttcccgccgccaccagcgggagtgctttggtttctggtgcccatagccaggttacaacaaaaccagccaacaacactgccgccaggagcaataaggtgacttgcattccccactgcgccagcacccacggcagcaggccagtacttaccgccgcccccaaccgactcatggcggtggcaaaaccgacgcccagcgagcgaatgtcagtaggaaaactttccgcaggcaaaatgcccaccagattactgactgccgaaatggtggtgctgaagagaacaaaagcagcagcgttaatgaactgccggaaggcaaacaggccatcactaccagcgttgccgccagcagcaaaaaacttcccagcaaaaatttgcgatgtgccagcaggtgcgtcagaactaatcccagcagcgcgcccacaattaacaacgcattaagcatcaggctggcagtcagcgcatcttccagtccaatagtctgggcgatagttggcagccaggtataaatcacaaaccatgggattacgaggcagacaaagaagacgctgttaaacgccgtgcgccgccagtagcgcgaagagaacaaggttttgatgtgtttatgggtcgccgttgccacttcatcgcccagtaaaacatggggaccaaaatagcgatgcacgatagcgtgagcttctgcaaaacacccctggcgcagtagccagcgtggcgattctggcgttccccagcgtaataacgtaatcaacaacgcgggcagagctgccgatgccagcagccagcgccaggcctccgggttttcggaaataaagtgatgtccggcaatacttgccaacacatagcctacggtccacaccacgctgaatgcgcccagcaaaacaccgcgatggcggcgcggggaaaattcagccagcaaggtgtgacctactgagtaatcgcctcccagaccaatgccgatcaaaatgcgcagtccaataagatgctctggcgtggtggcaaaaaattgcaagaacgaagcgagcgtaatcagcaaaaagctgaaggtgaagattttttgccgaccaatatggtcggagatccacccaagaaccaggctgccaagaaacaaaccaaggtgcgccgagccgccaatcattcccgccataaacggcgtcagttgcatggcgggcgtaagttgaataatggcgtaaccaatgacgccgagaacataaccgtcggtcaggtgtgcgccgaaagtgagcgcagcaattcgacagtgaaaacggttaagcggtaaatcatccattcgcaccggtgaagtgttcatctttaccccttcattgtccggtaataagaacggcttctcgcctgagaagccgaaaaggcaacgccccatcatcgcggaacgctgcctgacacattatttttcaatcggatagatagtacccgtattcataatgccattaggatcgaactgctttttcagcccttccagcaacgcccacgcgctgccgtgttccagcttgctccagtgaacgcgatgtttaccgataccgtggtggtgcaccatcgaaccaccgaggcgaatggtttcttcgcaaatgattttgttgagcggattgtggtacttgtcgatttcctcttccggcttacagttgacaacgttgtagtcgtagacgaagtacatgttggtgccgttctgatagctatgagaggagtgaccgcccagcatggtgatgtcgtcggcgtgcgggaactcggtacgaatacggttaataacgctttcgtagatttcgtggatgcagctccagcagccggacacttcggtagtaaagcccatgttgccggttttgaggatctgcacacgttcggcagccactttatccggtccccagttcaggttgttaaaccaggtttcgatcagcttgctgtccacgcgttggcattgcgggtagcgggcaacgatttccgcaatcccttcgcccgtcgccttcgcaatgcgagggttaccttcagccataaagatcagcacgcattttccgtcggcaaaatgggtgaagtgttgggtgccatcttcagcgtcatacaaacgagcgatcgacggacgatacccttccaccatgatttcacgcaggatgttgaagccggttttcatgtcttccaggatatagccgtagaagaggttgttttccggggtgaatttaaagattttcactgttacttcagtgatatagcacaatgcaccttcgttgccgatgatgatgtgacgaatgtccgggccagccgcgcggcgtggcacgtttttaatgcgtgtgacggtgccatctgccaacactgcctccagaccaacgaccatatcttcgattgcgccgtagagtgtggagaactgcccgatactgcgggttgctaccaggccgcccatctgcgccagcggctttgactgcggagaatgccccgtggtgtaacctttttcacgcaacgcgttttccagcacctccagcggaacaccacattgcgccgtcgcctgcatattctcaatatcaatattaatgatttgattcatggcgggaccgtcgagcaccaccgagttttctacaacagtttccagcccaccttcggtggcggaagcaccggtacgcggcacaccgttaattttgtgcgcattcataaaattcagcacacgggatacttgctctgtggaaccgagttttacgaccgctgccggaatcggcaaagtataaatgccatgaatatccggaaatttacgaaaacggtcaatactgttcttctttaatactgtttcatcggtaattacgcgatctgcaccaacaatttcctttagctggtcgacaatcgctgcgcgagataaagacatagtaattccttcctgataataaaaatggaataatcattaataagagaaaacagaaaccaccgttatgggttagcgcactaaataaccgccatcgaccactaataaatgcccgttgacataattcgatgcctgacttgcgagaaacacggctgcgcccattaaatcctgagtatcgccccaacggtttgccggaatatgatcaagaacgcgctgattggtttctggattactgcgtgtcgccagcgtaatgtctgttgcataatagccaggggcgataccatttacctgaatattatattgacctagttcatcacaataagctttggtgaatccggcaagagcatgtttagtagcagaatatgcaggtgaccattgtccacctaagtaagagaacaatgaacagatattaatgattttaccgcttttctgcgggatcataatttttgccgcttcgtagcttaactcgaatgcggcggtcaggttcacatcaatcatcgggtcccagtcggcacgaccgaagtccagcaccttattcagcttacaaataccggcattgttaaccagaatatcaactgtaccgaaacgctcacagcaggcagcgataatcttctgcggcgcgccttctgcggtgatatccacctgcatgaagtccacctcaacaccctgattttcaatcatttcctttgtttcgccgttatctttgacaaaacttggaataaagacatttgcgcctgctttggccaacgccatggcaaatgcctggcctaaaccgctattcccgccggtaacaattgcggttttacctttcagggagaaaaaatccattgagaacgcattgagagattcgattgacatagttagctccaatttccgtaaggcaaaaaaaaagaaaggtaacttcccccgcgagagggaagttacctttctcattatctctggtaactggagataatttttagcataaggacataactgctaatgtgatcgtaatcacagtgtgatattcgtattatcaaatagttttaaaaagcagaagcgtgattactctcacacaacacctctgctttccatgttatttattatttcaattactagagacctgagaaaagtaatccacctgaaagggcggcttacttttctcttttttttgtctattacaaatgggaatacgatatgcaacacaactcatatcgccgttggataaccctcgcgataattagttttagcggcggcgttagtttcgacctggcttatttacgttatatttatcaaattcccatggcgaaatttatgggattcagcaataccgagataggtttaataatgagtacctttggtattgcggctattattctttatgcccccagcggcgttattgccgataaattttcacaccgcaaaatgattacttccgcgatgatcattaccggattactgggtctgttaatggcaacgtatccaccgctgtgggtaatgctctgtattcaggtcgcctttgcgataacaacgattttaatgctgtggtcggtgtcgattaaagccgcatcgttgcttggcgatcatagcgagcaagggaaaattatgggctggatggaagggctgcgcggcgtcggtgtaatgtcgctggcagtgtttaccatgtgggttttttctcgctttgcaccggatgacagcaccagcctgaaaacggtcattatcatctatagtgtggtttacatcttgttggggattctgtgctggttttttgttagcgataacaacaacctgcgcagtgccaataacgaagaaaaacagtcattccagcttagcgacatccttgccgttttgcgtatcagcaccacctggtattgcagcatggtgatttttggcgtcttcaccatctacgccattctgagttactccaccaactatctgaccgaaatgtatggcatgtcgctggtggcggcgagctacatggggattgtgatcaacaaaatcttccgcncgctgtgcggcccacttggcggcattatcaccacctacagtaaagtgaaatcccctacccgcgtgatccaaatcctttccgtactcggcctgctggcgttaactgccctgctcgtcacgaactctaacccgcaatcggtcgcgatggggattggcctgattttactgctgggattcacctgttacgcctcacgcgggctgtactgggcctgccctggcgaagcgagaacaccgtcttacattatgggcaccacggtaggtatttgctcggtgattggattcctgccggatgtnttcgtttacccaattatcggccactgacaagacaccctgcccgcagcagaagcctaccgcaatatgtggctgatgggcatggcggcgcttgccatggtgattgtctttacctttttgctgttccaaaaaattcgtactgctgatagcgcccccgcaatggccagcagcaagtaagccaggaaaattacaggagaaaaatcatgtcgaagaaatacatcatagggattgatggcggaagtcagagcacaaaagtggtgatgtacgatctggaaggtaacgtggtttgcgaaggcaaaggtttattgcagccgatgcacacgccagatgccgataccgcagaacatcctgacgacgatttatgggcatcattatgttttgccggtcacgatttgatgagtcagtttgccgggaataaagaagatattgtcggtattggtctgggatccatccgttgctgccgtgcgttattgaaagccgatggcacgcctgctgcgccgttgattagctggcaggatgcacgcgtaacgcgtccctacgaacacactaatcctgacgtggcctatgtcacctctttttcgggttatctgacgcatcgcttaaccggcgagtttaaagacaatatcgccaactattttggtcagtggccggtggattataagagctgggcatggagcgaagatgctgcggtaatggagaagtttaatatcccccgtcatatgctgtttgatgtgcaaatgccaggcactgttcttggacagatcacaccacaagccgcgctggcgacacatttcccggcagggctgccggttgtttgtaccaccagtgataaaccggtagaagctctgggagccggattactggatgatgaaacggcggtgatttcactcggtacttatatcgcgctgatgatgaacggcaaagccttgccgaaagatccggtggcgtactggccgattatgtcttctattccgcaaacattgctgtatgaaggttacggtattcgcaaaggcatgtggacggtgagctggctgcgcgacatgttaggcgagtcgttaattcaggatgccagggcgcaggatctttcaccggaagatttactcaacaaaaaagcttcttgtgtgccacctggctgtaatgggctgatgacggtgctggactggctgaccaatccgtgggaaccgtacaaacgcgggattatgatcggctttgattccagcatggattacgcatggatatatcgttcgatactggaaagcgtggcgctgacgctgaagaacaattacgacaatatgtgtaatgaaatgaatcactttgcgaagcatgtgatcattactggtggcggttcgaacagcgatctgtttatgcagatttttgccgacgtgttcaaccttccggcacgacgtaacgccattaacggttgtgcaagtctgggggcagcgatcaatacngcggtaggtctggggctatacccggattacgcaacggctgtcgacaaaatggttcgcgtgaaagatatctttataccgattgagagcaatgccaaacgctacgacgcgatgaataaaggtattttcaaagccctaaccaaacatactgatgtgatcctgaaaaaatcgtatgaagtgatgcatggggaattggggaatgcggattcgatccagagctggtcgaatgcgtaagtgaggaagaccgggcgggaaactgcccggcctgaacatacctgaatggttatccccgctggcgcggggaacataagttcgacaacttaaaaaatgataacaagtccggtttatccccgctgatgcagggaacataataaaaactttaactagttcggtttatccctgtttttacaaggaatattaactacactcgatgtctttagaataaaagacaatacgaatcgcactttatcaattttcacttaaagtatgaactggatatctttattcataagaactattcatcaacagcgtatagaggcggttatgtaaaaccactcattagcctcaaaacaaagacaaatttccagatttattacttaatcaatgaataacaagattaaaaaacaaactatcaacctaaagaaanntaatagacattaattcaatttaaaaaaataatagataaaatttcttaatggattaaatatcatacaaataacactttaattaaatttgattttttgtatcgataattgtgaacttttcatatatggagagctattttgaacatgaggggttacgtggatatgttgcttattacgagtactgctaatataaaaacttgagaaagagataacgggttatatggtggtttatccccactggcgcggggaactcctcgactttaattttttcgctgcccgcttttgcggtttatccccgctggcgcggggaactctctaaacataacctattattaattaatgattttttaagccagtcacaatctaccaactttacagtatcacacaaacaacacatccattatgttaaagagcacttaacccattgattaaaaaggtaaanatttaaaataactctatacaaactaaaatctaccaaactttaccgcaataattttcactccagcgaaaaattaacgccacagaatttgtagagaatgataatgattagtccgggataggcaagatggatgagttttcagagacgacaaagaatataaatgagtagaagtctttacaggttccacccatttataacgcttataaatgtttaatcaggcaatatttaaatatttatgggtttgcatcgacaaacgccaattacgcgcaatgcaggtttcaatgcacaaacgtgtggcatcatccttttggctaatcggctgcagtgcaatgactcgcggtttatcatcggtcagcgtcgccaaaagttcatccagtgcttcaatatcacgtacgcgtcccactggatgcttgatttcgttggctcgctccagtgcctgtgacaacacttcatagccgccgcgcatgttcagctttggcgatacggtaacccaggtattcggtgtacagcgtacttcatgagtaccactggtttcgatctggcagctaaaaccgttcttttcgagcaggtcagtcagtggcagcaaatcatgaatgcaaggctcaccacccgtaatcaccacatgccgcgcggtatatccctggcgaccaatgacagccagcaagtnttcactgctcgccgccccccacttatcactctctttggtcttcgccagaatgctgaaaagggagacttcccgatcctcaagcttttcccaggtgtgtttggtgtcgcaccaggcacagccaaccgggcatccctgtaaacgaataaaaatggcggggacgccggtaaagtaaccctcaccttgcagggtctggaacatctcgttaatcgggtactgcatagcattctctgtgaagtggataattgttaattattgcagatcctgccacaacaatcatgtcttattaacattctgttacaggcaggtttatggcaaaaagtggattagatcataaagaataaaatgaagcagagtattatgttttaaggaattaattaaaagggatttaaacacgctcagaatattcatcgtaattatatttattttcaatttatcaggctgtggatataacgatattcaaacctatgatgagcaggttaacgcctcctggtctgaggtattgaatcaatatcaacgtcgcgccgatcttattcctaatcttgtcgccagcattaaaggttattccagccatgaacgagatgtactggaagccgtaacattggctcgtagccaggctaatcgcgccagtagcgatnttcagcaaactccgggagatgaacaaaaattacaagcctggcaacaggctcaagcgcaggtgactcgcactctcggtcagttaacgataattagtgagcgttaccctgagttaaaatctcaggaactctatcaaaatttaatggtacagcttgaaggaagtgaaaatcggattgccgttgcgcgaggaagatatattaaagccattgaacaatataatgtcactatccgcaaattccccgctgtattaaccgcaaaggtcatggattacacaccaaagaaaaattatttgccggatgatgtcgccgcagtaagtaaagccccaacaatagattttagccagaatgctaatgctcattaagcggggaagttctatgcgaaattttatcttccttatggctttcttctgttcatctgtgtttgccacacaaattccagtacctgaatcacccaagtatgtgaatgacttaaccggcacattaacaaacagcgaagtaaacaccctgaccaaccagattaaagccctgacgcaaaaaaactacgcacagttggtcgtgttagtggttgaaacaacaggcgatgaaaccatcgagcagtacgcgacgcgggtattcgatagctggaaaccgggtgataaagaccgcgatgatggcgttctactgttagtcgcctggcaggatcataccgtgcgtattgaaatcggttacggactggaaggtattattacggatgcgcagtccgggaaaattattcgcaacagtattattcctgcatttaaaaaaggcgacctggctggtggtttgcaaaagggaatcagcgatattgaaagtcgtctgacggggaataatttagcaacgataacaccgaccgatcaccctttgccctttagcggttggtgggcattgttagtctgggcgatagtactgacgtttatttctgccagaggatatatcaaaacgctgggagtaatttgcttcgcagctattgtactggcctttgttttacctatagcgggcttcagcggaagctggggagtactcgcaacattactctgcttcgccacaccgttcctggctgtcgccatcgcttttacccccttcggcaaaaaagttcgggatttgatgtgtgatgccaaccagccatcacgccatacaagaagcaattcttcctcccactattcatcatcgtcatcctcttcattcgacaatgacaattttagcggtggtggcggttcatctggtggcggtggcgcttccgggcgctggtaacaaaaggaattgatatgcgtatttttctcttacttctgatgctatgcggttttcaggtattcgctgaacgattgccttcagtgactgacttaaccgggacattaacgacagaagaacaaactgctttaactcaacaattacagactctcgagcagcaaaaccacttccaggtggccgtgttggttacgccgaccacagggggcaaaaacattaaacttgcagcctcgcagagatacggggtatatcactggaaacccgttggagagaagcgatatggcgaaggtatcttaattctcgtcgtatggccggaagggctggcgtcaatgaagattggacatggactggaagagatgttgccgccggaacaagctgcgcaaattgttcgttaccatatgcagccagaattcgaaaaaaacaatctctttgctggattaacgggcggaattgaaagcatcgcacagtttacccatatcaaagcgaaccttagccctttggatgctttagccaatcatctgtttgctaatccgcaacgttcgctgccatgtcttgcctggacactgctgatgatcgttgccatcgttgtcctctggctatttgccagccgcccacggcgtggcatatggatgatatcgatgattacccctatggtctggtttttctcctttcaggacgatgtcatcattcggcgggtatcggtcgtttgttttagtttattgttagcaacaacctgcaagcagcgtctcgcggtagtttttaatatgtgccgcgtatttcctatgatgctgaccccaaaaaataaaaacgctaaagtgaaaaaacaaaagaagactccgcaggttcgtgaatcaggacgaaattcattgtttgtcgtgatgctgataattattgtgggatggtgcctggtgttcgccagtaataaagatattgcattcatctcaacaattattgggttaattgatcattttatcggcccaataaccattgctggcatcgttctgctgatcattgtggccaaatttactggcaatcttaagctggggtcaggagaaaaaagcaacaggaaaacggggaatcgtaatgctcattctcgctcttcgtcgagaaattctttccgcggtggtggcggttcttcaggaggcggcggttcatccgtccgttggtgatcgtaatgcgcttaatctttattctattcactttgtggtgccttcctgggctnnnccagcaaattgctgtgccggaactgcgccaacaggtgaccgatattactggtacgttaagcacttctgaacaacaatcactgacacagcaactgcaggatattacacataaaacacgggcgcaggtcgctgtattagtagtgccgtccaccggagacgattccattgaacaatatgctacaagggtttttgatagctggaaactgggagataagcagagaaacgatggtattttacttctggttgcctgggaggatcatgctgttcgtattgaggttggctacgggctggaaggggtggttaccgacctgcaagcggcgaagattatcagggatatattgatccctgccttcaaaagtgatgacctgatgggtggattaacactggcaagcgaaaatatcggcgcgcttctgttgaatggtgaattaccggaagacaggggggattattacagtatcaatccccctattccattatcgcttgctgtaattatattgctggcggtactttcatattttattgtttttaccgatccgtcgaatttaccctggatcactctcactggcgccatttacgggatggtattcctctatgttgccgagccaggaccatggaccaatttaatcgttgcctgcggtatgttaacgccttttgcgatcgtaccactggttattttttggcttatcgtcaataaaaagctacgcgccaaatacaaaaaactcagtaaagatagagcttcaagaaaaggttcttcttcatcctcttccggtggcggctcaagtggcggaggctcaggcggcggatttagcggcgggggcggttcttctggcggtggcggcgcgtccggtcgctggtaactcaaccataaaaaacgccagcccgaaggctggcatttttaaatcanataaagtcagacttatgcctggcctttgatctctttacgaccgttgtacggtgctttttcgcccagagcttcttcgatacgaatcagctggttgtatttagcaacgcggtcagaacggctcatagaaccagttttgatctggcctgcagcagtaccaacagccaggtcagcgatggtagcgtcttcagtttcgccagaacggtgagagataactgcagtgtagccagcgtctttcgccatcttgattgcagccagagtttcggtcagagaaccgatctggttgaatttgatcaggatggagttagcgatacctttttcgataccttctttcaggatcttggtgttggttacgaacaggtcgtcaccaaccagctggattttgtcgcccagaactttggtctggtatgcgaaaccatcccagtcagattcgtccagaccgtcttcgatggaaacgatcgggtactgtttggtcagttcttccaggaagtgagtgaattcttcagaggtgaatgctttgttgccttcgccagccagaacgtatttaccgtctttgtagaattcagaagctgcgcagtccatcgccagagtgatgtctttgcccagttcataaccagcagctttaacagcttcagcgataacagccagagcttcagcgttggaacccaggttcggcgcatagccaccttcgtcaccaacagcagtgttcatgcctttcgctttcagaacttttgccaggtgatggaaaacttcagaacccatgcggatggcttctttcacagttttcgcgccaaccggctgaatcatgaattcctggatatcaacgttgttgtcagcgtgctcaccaccgttgatgatgttcatcatcggaaccggcatggantntttgcccggagtgccgttcagttcagcgatgtgctcgtacagcggcatacctttagcagctgcagcagctttggcgttagccagagatacagccaggattgcgttcgcgccgaatttggatttgttttcggtgccgtccaggtcgatcatgatcttgtcaatgccagcctgatctttagcatctttgccaatcagcgcctgagcgatcgggccgtttaccgcagcaacagctttggttacgcctttacccaggaaacgggatttgtcgccatcgcgcagttccagagcttcacgggaaccagtagaagcacctgacggagcagctgccataccgacgaaaccaccctccagatgtacttcggcttcaacagtcgggttaccacgggagtcgatgatttcacgaccgatgatttttacgattttggacattaggttttcctcaagtcactagttaaactgaaactccagacaaacaacgcgtacccagggtacgcgttgccgttctaacttttttacttacttcgcctgacgtttctggaactcgctggcggctttcacaaagcctgcaaacagcgggtgaccatcacgtggagtagaagtaaactccggatggaactggcaagccacgaaccacgggtgattcggaacttcgatgatctcgaccaactgatcatccccggaacggcccgcaacgcgcagacctgcatcttcaatctgtttcaacagcatgttgttgacttcgtaacggtgacgatgacgctcaacaattgtcggcgcattgtacagctggcgaaccaggctatcgtcaaccaactggcactgctgtgcgccgagacgcatggtaccgccgagatcgctcttctcgctacgaacttcaacgttgccgttttcatcgcaccactcggtaatcagcgccacaaccgggtacttacagtctggcacaaattccgtagagttggcgttctccatgttggcaacatggcgagcgtaatcaattaacgccacctgcatacccaggcaaatgcccagataaggaatattgttctcacgcgcaaaacgcgcggtcgtaatcatgccttctacgccacgatagccgaaaccgccaggtacgaggattgcatccagacctttaaggatttcaacgccgcgcgtttcaacatcttgtgaatcgatcagtttgatgttgacgctgacacgattcttcagcccaccgtgtttcagtgcttcaatcacggatttgtaagcgtccggcagttcaatgtacttgccgaccataccaatggtgacttcacttaccggattcgcttcttcgaagataacctgttcccattcggacagatttgcttccgggcagtttaagctgaatcgtttacaaatataatcgtccagcccctgagatttcaacaggcccggaattttatagatggaatcgacgtctttcagagaaataaccgctttttccggaacattacagaacaatgcaatcttcgcacgttcgttcgccggaacggcgcgatctgaacgacaaatcaggatgtcaggctggataccgatggagagcagctcttttacagagtgctgagtcggtttggttttgacttcaccagacgctgccatgtacggcaccagcgtcaggtgcataaacagagtgtgctcacggccaatttcaacagccatctggcgaatcgcttcgaggaacggcagggattcgatatcacctactgtaccgccgatttcgaccagtactacgtcatgaccttcgccaccttccagcacgcgctctttgattgcgttagtgatgtgcggaataacctgtacggttgcgccgaggtagtcaccgcggcgttctttacgcagaacgtcagagtagatacgacccgtggtgaagttgttgcggcggctcattttggtacggatgaaacgctcgtagtgccccaggtccaggtcggtttcagcgccgtcttcagtaacgaacacttccccgtgttggattgggctcatagtacctggatcgacgttgatgtacggatccagtttcatgatggtcacattgaggccacgggcttcaagaatggctgcgagggaggctgcggcaatgcctttacccagagaggatacgaccccgccggtcacaaaaatatagttcgttgtcatgctgaacctgagaagttaggttgaaaagacgatggaataaccaggacgggaaagcagtatacccgaacatgacctgtgccacaaactttcattatccctcctcttcgccagcgcactattgaaatcaggagtgagaaaatagcccctttggggtaaatgtttttgacgcaaatcaagc

SEQ ID NO: 1463 - DNA, 6057 bp, Escherichia coli
  Strain O55:H7
  modified_base (457)..(458): a, c, g or t
  modified_base (545)..(545): a, c, g or t
aaaatgacacaaatggcgcttgaccgcgtaattcccttagagatcaatttcctgccgttttacctgttgccagacttcttccattgtttcgaggtcaacacctgtcatttccagtccacgcgcggcaacaatacgctccacttcgcgaaaacgacgctcgaatttttcgttcgctttttgcaatgcgatttccgcttttgtccctaaatgacgagccagattgaccgtggcaaacagcaggtcccccatttcctcctccagtttagcctggtcgacaacagcctgccgcgcttcgtacatcacctcgtcgatctcttcgtagactttatcgactaccggaccaagcgtcgtccaatcgaagccaacgttggcgcaacgtttctggattttttgcgcacgcattaaagccggtaaactacgaggaatatcgtccagcgccgaatgctgcgctttctgnncgcgctcttcggttttgatttgctcccaacgggcaagcacttcactactgttttcggcagaactgtcagcaaaaacatgcggatggngacgctctaatttatcgctaatcgcagcgcaaatatcattaaagtcaaagcgcccttcttcctgagccatttgggcgtaaaacaccacctggaacagcagatcgccgagttcaccgcgcagatcgtcaaaatcttcacgggcgatggcgtccagcacttcgtaggtttcttcaagggtgtaaggcgcaatggtggcaaatgtctgctctttatcccacgggcagccgttttccgggtcgcgcaggcgctgcataatagtgagcaaacggtcgatttgattcattagaatgtcctgaaaattgcgggtccgtcaggtggaaacctgtgaccagaatagaagtgagttagtaacactacccaatcagtacgttaattttggctttaatgagttgtaattcctctggggcaaccgttcctttcttcgttgctcctcttgcccgccaggcgatactttttacctgatcagctaacgctacgccatcacgttcctgaccggataaaacaacttcgaacggatatccttttgattgcgttgtacaaggaacacacagacacatacctgttttgttgttgtacatgaacggactcaggacaacagccggacgatgtccggcttgctcgctaccttttgtcgggtcaaaatcaacccaaatcagatcgcccatatcgggtacgtatcggcttaccattaccagacttccttatctttcggctctccccagtcgatattctcgtggaggttttccggcgtgatgtcgttgaccagttcagcaagcgtaaatacgggctctttacgcactggctcaataattaatttgccatccaccaggtcaatcttcacttcatcatcaatattcagattgagcgcctgcattaacgtagccgggatccgcaccgccggtgaatttccccaacgctttacgctactgtggatcataaccctttcctcaaaccactatcatatgtagatacagtatatatcaatctacattgtagatacgagcaaatttcggcctaactcccgtgcaaccgacgcgcgtcgataacatccggcacctggttgagtttacccagcacgcgccccagcacttgcaggttgtaaatctcaatggtcatgtcgatggtcgccagttgctgtttggtgtcgctacggctggcaacgccaagcacgttcaccttctcgttggcgagaatggtcgtgatatcacgtaacaacccactacgatcattagccaccacgcggaccaccagcgaatatccggcggagtagctctcaccccataccgcgtcaacaatgcgttctggcgcatgggagcgcagttccgccagttgttcgcaatcggcgcggtgtactgaaataccgcgtccctgggtaatgaagccgacaatctcatctccaggaatcggctggcagcagcgcgcgatgtggtgcatcaggttaccaacaccttcaaccactacacgaccgttatctttactgcggttttgcggcgtgtagcttttttgctgaagctgtttcagcgcggcggcgtcctgctcttcggcactcggcttattaaattgcgattgcaggaagttcaccatctgattgagacggatatccccgccaccaatcgccgccagcaactcgtcgacatcattgaagttgtaacgcggcagcagatgtttttctgcttctttcaggctgatccccagatgttccagctcgtcgtcaaggatttgccgcccagccagaatgtttttgtcacggtcctgtttacggaaccaggcgtgaattttcgaacgcccacggctggttgtgacgtaaccgaggtttgggtttaaccagtcacggctggggttcggctgtttctgggtgataatttcaatctggtcgcccatttgcagctggtaggtgaacggcacaatgcgcccgccaatttttgccccgatacagcggtgtccgacatcactgtggatgtggtaagcgaagtccagcggcgttgatcccgcaggcaaatcaacgacatcacctttaggcgtaaagacgtacacccggtcgtcaaagacctggctgcgtacttcgtcgagcatttcgccggaatcagccatctcttcctgccacgcaatcagtttacgcagccaggcaatccggtcttcatgtcccgaacgtgcgccgccagcagccgcgccctctttatatttccagtgcgcagcaacacccaactctgcatcttcatgcatctgtttggtgcggatttggatctcaacggtttttccacccggccccagaaccacggtatgaatagactgataaccgtttggtttcgggttagcgacgtaatcgtcaaactcatccggcaggtggcgatagtgagtgtgcactatccccagtgcggcataacaatcctgtaaacgctcggcgacaatacgtaccgcacgcacatcaaacagctcatcgaaggcgaggttctttttctgcattttgcgccagatgctgtagatgtgtttcggacgaccatacacttcagctttaacgccttcagctttcatctcagcgcgcagatgaccgacaaactcttcgatatagtgttcgcggtcgagacggcgttcatgcaacagttttgcgatgcgtttgtattcggtcgggtggagataacggaagcagtaatcttccagctcccatttcagttgcccaatcccaagacggtttgccaacggcgcgtagatattggtgcactcttttgccgccagtacgcgttcatcttccggcgcatcttttacttcacgcagatgagcaatacgctccgccagtttgatgaccacgcagcgaaaatcatcgaccatcgccaataacatccggcgaacgttatcgacctgttcggaggaaacagaatcagtgtgcgtcgctttcagctggcggatcgccgccatatcacgcacgccgtgaataaggttaacgaccgacttaccgacgctctcacgcagcacatcttcgctgactacgttggcatcagccagagggaacagcagcgccgcccgcagcgtgtcaatgtccatacttaatgtcgagaggatctccaccatctcaacaccacgccacaataacagactggcatccggatgcccctgcgtctgttgcagacaatacgcccaggtttcggctaagcactcacacgacttctggctggtaatacccagacttgcgatccatttttccggatcaaattcaccagccttattgatatgtgcacttcttaccgcaaccatcgtcctctcctttagggaccagacctgccgaaatcggcaaatcgcaactatttaacgcgcgagaaaagtaccatcgattccagatgtcccgtgtgtgggaacatatccagcatcgccagtcgcgcaatggtatatcctgcttttaataacgcttcgctatcccgagccagcgttgcagggttacaggatacataaactatacgaataggttccagttttataatttgctgcataacacctgcggcacctgctcgcgccgggtccagcaacactttatcgaagccgtttttcgcccacggctgctttgtgacatcttcttcaagattttcgtgataaaacgtcacattctgtaagcagttaagacgcgcattctgctggcctttttccaccagcgccggaacaccttctacacccaccacactggcagcttgtgtcgccaatggtagtgtaaagttgcccataccgcagaacagatccagtacgcgatcttcaggttccacctccagccattccaacgcacgcgctaccattttttggttcacacccgcattaacctgaataaaatcgcgcgggctaaaagttaagcgcaacccgtttgagtcataccagggcatctcaccagagacggtttcgagtatctcactatcgggggcgagatacagatccaggccttcagaatgcgaaaagcgttccagtttttcgcgatctgccgaacttagcggtgcggtatggcgcaaaatcatcagcgtgccgctggttgcctgtaccagttcaacatgaccaagatggcgcatagcttgtaagctgcccaggcatgccctgactttgggcagcaatgcttcaagttggggcactaaaatgggacattgtttaacgtcgacaatgtcactggagcccgctttgcgaaaccccatctgaagttgctgtgttttcggtaagtagttcagacttaaacgcgcgcgacggcgatagccccagggaacatcggcgatcacttcagagacttcgtgtttcattaatcgggcgagtgccgcacttttgcttcgctgctgtaaatccacgctggcgtgttgttgctgacagccgccgcatacgccaaaatgaggacagcgtggcgtttcgcgttccgggctatcgcttaaccggcgtacgactttagcgcgggcatactgttttttatcctcagtaacagtaacttccgcgttttcctgcggcaataatccggggataaatagcgttttgccgttatgtcgcgccacgccctgaccaaaagagtcgaggtcgttgactgaaacggttatgatctgacgcgtcgtcgtgcgtcgttttgcagagtagaattgcgccattggcgagactttctcaatttaacagtgtgaccttaattgtcccataacggaactccatgaccaactacagcctgcgcgcacgcatgatgattctgatcctggcaccgaccgtccttattggtttattgctgagtatctttttcgtcgtgcatcgctataacgacttgcagcgtcaactggaagatgccggtgccagcattattgagccgcttgcagtttctactgaatatggcatgagcctgcaaaatcgcgaatctatcggtcagttaataagcgtactgcatcgtcgccattccgatattgttcgcgcgatttcggtttatgatgaaaataaccgactctttgtcacctccaattttcatcttgatccctcatcaatgcagctcggcagcaacgtgccgtttcctcgccagctcactgtcactcgtgacggcgatattatgatcctccgcacgccgattatttctgagagttactcccccgacgaatcgcccagtagcgatgccaaaaatagtcaaaatatgttgggatatattgcgcttgagctggatcttaaatcggttcgcttgcagcaatataaagagatctttatttccagcgtgatgatgctgttttgtatcggtattgcgcttatttttggctggcgcttaatgcgcgatgtaaccggtccgattcgcaacatggtgaatactgtcgaccgcatccgtcgcgggcaactcgacagccgagtggaaggatttatgctcggcgagctggatatgctgaaaaacggtatcaactcgatggcaatgtcgctggctgcttatcacgaagagatgcagcacaatatcgaccaggcgacgtccgatctgcgtgaaacgctggagcagatggaaattcagaacgttgagttggatctggcgaaaaagcgcgcc

SEQ ID NO: 1464 - DNA, 16182 bp, Escherichia coli
  Strain O55:H7
  modified_base (153)..(156): a, c, g or t
  modified_base (1051)..(1051): a, c, g or t
  modified_base (2685)..(2685): a, c, g or t
  modified_base (4522)..(4522): a, c, g or t
  modified_base (6921)..(6921): a, c, g or t
  modified_base (8701)..(8704): a, c, g or t
  modified_base (9964)..(9964): a, c, g or t
  modified_base (12119)..(12119): a, c, g or t
  modified_base (13443)..(13446): a, c, g or t
  modified_base (15894)..(15894): a, c, g or t
  modified_base (15966)..(15966): a, c, g or t
cggcgcgtattaaatccgagtttctggcaaatatgtcacacgagctgcgtacaccactgaatggtgttattggttttacccgcctgacgctgaaaacagaattaacaccaacgcagcgcgatcacctgaatacgattgaacgttcggcaaatnnnntgctggcaattattaatgatgttctcgacttctcgaaactggaagcaggtaagctgattctggaaagtattccattcccactacgcagcacgctggatgaagtcgttactctgctggcacattcttctcacgataaagggttggaactgacgctcaatattaaaagcgacgtgcctgataacgtgatcggcgacccactgcgattacagcaaatcatcactaacctggtggggaatgcaattaaattcaccgagaatggcaacattgatattctggtagaaaaacgtgcgctgagtaataccaaagtgcagattgaagtgcagattcgggataccggcattggtattcctgaacgcgatcaatcgcgcttattccaggccttccgacaggctgatgccagtatttcccgccgtcatggtggcaccgggctggggctggtgattacacaaaaactggttaatgaaatgggcggcgatatttcgttccatagccagccgaatcgcggttcaactttctggttccacattaatctcgatctgaacccgaacattattattgaagggccatccacccagtgcctcgccggtaaacgcctggcctatgtcgaaccaaactccgcagcagcgcaatgcacgctggatattttaagtgaaacgccgctggaagtggtttatagcccaacgttctccgcgctgcctcccgcgcattacgacatgatgttgttaggcatcgcggtgaccttccgcgagccgctaacaatgcaacatgagcgattagcgaaagcggtatcgatgaccgatttcctgatgctggcacttccttgccatgcacaagtcaatgctgaaaaactcaagcaagatggtatcggcgcgtgtctgctgaaaccattaacacntacgcgcctgttgcctgccctgacggaattttgtcatcacaaacaaaacacgcttttgcctgtaaccgatgaaagtaagctggcaatgacagtcatggcggttgatgacaaccccgctaacctgaaacttatcggcgcattgctggaagatatggtgcaacatgtggaactttgcgatagcgggcatcaggcggttgaacgggcgaaacagatgccgttcgatttgatcttaatggatattcaaatgcctgacatggatggcattcgggcctgcgagctcatccaccagctcccccatcagcaacaaacgccggttatcgcggtaacggcgcatgcaatggccgggcaaaaagagaagctgcttggcgcagggatgagcgattatctggcgaaaccgattgaagaagagcgattgcataatttgttgttgcgctacaagcctggcagcggtatttcgtctcgcgtcgtgacgcccgaagtcaacgaaattgtggtgaacccgaatgcgaccctcgactggcaactggcactacgccaggcagcaggaaaaaccgatttagcgcgcgatatgctgcaaatgttactcgatttcctgcctgaagttcgcaacaaagttgaggaacagctggttggagaaaacccggaaggcctggttgatttgattcataaactgcatggcagttgcggctatagcggtgtgccgcgtatgaagaatctctgccaacttatcgaacaacagctacgtagcggtactaaagaagaagatttggaaccggagctgctggaactgttggacgagatggataatgtcgcgcgcgaagccagcaaaattctcgggtaacggacgtcttgtcgagtagcaatcggctttttatgacgctgttttcagattggtgacaaagtgcctgtgtttatgccggatgcggcgttaacgccttatccggcctacaaaaccaattaaattcaataaattaaaaagcatgtaggcctgataagcgtagcgcatcaggcaattttgtgtttggcatcagtctcaaaccggctccagatagagccggttttggttttttgtcttaacgcaccatgcacgggcgcttgttatcgaacgtccagccaggaatcagatactgcattcccatcgcatcgtcacgcgcgccaagcccgtgtttctgatacagctcatgggctttcatcacttgatccatatcgatttctacacccagccccggtttttctggcacctgtaccagcccgcctttgatctcaaacggttctttggtcaggcgctgattaccttcctgccagatccagtgcgtatcaatagcagtaattttacccggtgcagcggcggcaacatgggtaaacatcgccagggaaatatcgaagtggttgttagagtgtgaaccccaggtcaggccaaattcatggcacatttgcgccacacgtaccgaaccttgcattgtccagaaatgcggatccgccagcgggatatcaacggattgtaacgagagcgtatggcccatctgccgccagtcggtggcgatcatattggttgcagtcggcaggccagtcgcgcgacggaactctgccatcacttcacgcccggagaaaccttgctccgcaccacacggatnttctgcataagccagcgaacctttcaggtatttgccgattttaatcgcttcgttcagcgaccaggcaccgttaggatcgagcgtaatacgcgcctgcgggaagcgttgcgccagtgccacaatagactcggcctcttcttccccggccagtacaccgcctttcagtttgaaatcgttgaagccatatttttcatacgccgcttccgccaggcgcaccaccgcatccggcgtcatcgcttcttcatgacgcaggcgataccagtcgcatgagtcatccggctggctttgatacggcagaggtgtggctttgcgattaccgacgaagaacagataaccgagcatttcgacttcgctacgctgttgaccatcgcccagcagggatgccacgttaacccccagatgctgccccagcagatccagcattgccgcttctatcccggtaactacatgaatagtggtacgcaaatcaaatgtctgcaaaccgcgcccgccggcatcacgatcggcaaaagtattacgcaccagcgtcagaacgtttttgtattcacccagcgttttacccactaccagcggaattgcatcttccagcgttttacggattttctcgccgccgggaatttcccctacgccagtgtgaccagaattatctttgataatcacaatattacgcgtgaagaacggtgcgtgtgcaccactcagattcatcagcatactgtcatggcccgccaccgggatgacctgcatttcagtaacaacaggcgtcgtaaattgagaactcatatttatgtcctttttcagaatcaatgacggccgaaaacgggacgtttacggtcaaaggtccagccggggatcaggtactgcatcgggcctgcgtcgttacgcgcaccgccaggcagacgtttataggcctcatgtgccttttgtacctgttcccagtccagttccacgcccagaccgggcgcatcaggaacggcaatttttccgtttttaatctccagcggattttgggtcaggcgacaatcgccctcctgccaaatccagtgggtatcgatagcggtaggattacccggtgccgccgcgcccacatgggtaaacatcgccagagagatatcgaaatggttgttggaatggcagccccaggtcagcccccagtcgtcgcaaagctgcgccactcggactgcaccggaaagcgtccagaagtgcggatcggcaagtggaatatctaccgcattgagcatcaccgcatgacccatttcgcgccagttggtggcgatcatattagtcgcgacgggcaagccggtcgcccgccgaaactccgccatcacttcacgtccggagaagccctgttctgcgccgcatggatcttcggcataggtaagaacatcattcagccctttgcacagagaaatggcttcatcaagcagccatgcaccgttgggatcaacggtaatccgcgtatccgggaagcgtttcttcaatgcacgaacagtgtcgatttcttgctcgccaggtaacacgccgcccttaagtttgaaatctttaaagccgtagcgatcctgtgaggcttccgccagacgcacaacggcttcgctgttcatcgctttctgatggcgcaactgataccactcatggttgcccggcgtattttccagataaggaagatcggttttggtccgatcaccgatataaaacagataaccgaggacggtaatagcatcgcgttgcttgcctggccctaacagttcgcagaccggaacattcagcgccttacctagcaggtcaagcaaggcggcttccagcgccgccacggcgttaacgcgcaattcaaaggtccagncccctttaccgaaggtatcaaaatcggctgcttgattacctttatgcacctgctgaaccactttattcaggcgcgcaacttcctggcccagcaccatcggaatagcatcgaccaatgtctgataaatcacctctccgcctggcgcttcaccaatgccggtatgcccggcgttatcggtgagtaccacaatattgcgagtgaaatatgcgttatgcgccccaccaatattaagcaacatgctgtcgtacccggcgaccggaatgactttcatatcagtaataacaggactggattgtgtcgtcatcttattgccccgcgacaggtttcagctcgatacgcttgatatcgcccaccagcaccaggtagctcagtaccgcgattaaggcatgaacaccaacataaatcagcgccccattaaacgagccagtcgtgccaacgatataaccaattgcgattggcgtgacgatgccagaaatgttaccgaacatgttgaacaggccaccggaaagaccgctgatctcttttggcgcggtatctgccattactgcccaacccagcgccccaatgcccttaccgaagaaggccagcgccataaagccgatgatcatccactcaacgttgacgtagttgcagaacaccatcaccatcgacagcaacatgcccattacgatcggtgttttacgcgcaatgttcagcgatcccgtgcggcgcatcagccagtcggaaataatcccacccagcacatcaccgataaaaccacaaaccgccggaacggaagccacaaagcccgctttcagaatcgacatcccacgcgcctgcaccagataaaccggaaaccaggtaatgaaaaagtaagtcagggcgttgatacagtactgaccgatataaacgccgatcatcatccgtgacccgagcagttgtttgatctgcccccacttcacgctgaacggcactttaactttggtgttttgctgatccatattgatcagcgcgccacccgcggcgatgtactccagctctttctgatttacccccggatgttgatttggctcgtggatgactttcaaccagataaagctgatggcaatgcccagaccgcccataaagaagaagacgtgtgaccagcccacttcatgcgtcagccagcccataatcggcgcgaagatcaccgttgcgaagtattgagcggagttaaaaatcgacaccgccgttcccctttcctgcgccggaaaccaggccgcaacaatgcgactgttgccggggaaagatggcgcttcagcaagcccgaccaggaagcgcagagtaaacagggcaacgataatgccgaatccactaaagatatcgacgaagccttgcagcaaggtaaacatcgaccagataaagatcgaccagaagtagacgcgttttgaaccaaaacgatccagcaaccaaccaccagggatctgcccgataacataagcccatgagaaggcagagaacacatagcccattcccacgggatcaaggccgatatctttggccatttccgaaccggcaatagaaagcgtagcgcggtcgccgtagttgaaggatgtgacgataaacaacatcaccactatccagtaacgagcattcgtgcgtttttccacactgctcgcagcctgacttaaagaactcattgttgcactcctgaaaattcgcgttagccacgctcactctggactgcgacatcgccaggaaatcagaggtgacgtagggtgttttttgccgtttttataggtcgttcgccgaatacggcgcgtgtttatatctggcaatagcagtataaaaagcgcgccatagcggctcaccgtgcaacaacacaacattaatgcgttcaatgaggcccgattttggcattagccctggacggtggaatccacttcacggaaatgaaaacaagaacaagaaaggaagggttaaaacgaagaaataaagaagagtatgaaatggatcgcttgactccaggcaaacgccagtaaaaatccgcgctatgaagcagtttttactggcatttgcctgaaaagattcgattcagcaccgctaaaacgacatttaccgctcgctgaacatatcaggacaacagcgtgccccactgttcgacccacggatttgattccgtttccggttccgggttctcactggcgtcaatcaacagcatttcgccaacccgctgagcgctctgttcctgcagcaaggcatcgaactgtttgccgccattgcagaaattcacataactactgtcgccgagcgcaatcacgccataacgcagattcggctggaagcccagactatctttgattccctgaaagagcggcacaatgctatcaggaaggtcgccctgcccggtcgtggacgtaaccaccagaacatacttatcntgatagggcagccagtcgcttaattcaggatcttcaaataccgttgctttgtggccctgtgcggtcagaattgcttctgcttcttccgccactaacagcgaatttccgtacatggtgccgacaaaaataccaatttccgccataccgttttctccctggattaggaacttatctctccatcctgacccgatggcgcactgaactcaaccctttcattttcaggaagcagaccgcgccagccaaattgtgataacgcctgcatccaggtgtcgtccaggcccgcgtgaatagtcagcggctcaccagtaaaaggatgcgtcaatgacaactgactggcatgcagcattaaccgctgaagaccaaaatgctcagcaccgctgcgattctggcgtaaatcgccatgtttgctatcgccaataatcggatgacgcaaatgggcaagatgtcggcgaagctgatgtttgcgtccggttttcggctccagttccaccaggccgtagcgcgtggtcgggtaacgtccggtcgctaccggcatttctacggtcgccagaccgcgataatgcgtcactgctggctgcgggcctttatcttcgcgggcaaatttatcagcgattttgtccagttcttccaccagtggataatccagcaccgcttcttccatcaaccagccgcgcacaatcgcatggtaacgtttctggatttggtgctgttcaaactgttgtgccagcagccgtccggcctcgctggataatcccatcaacaacacaccagaagtgggtcggtccagacgatgagcagtaaaaacatgctggcctatctggtcacgcacggtttgcatgaccactactttctcgtcgcgatccagccagctacggtgaaccagccagccggagggtttatttaccgcaaccagccattcatcctgatagagtatttccagcattagctcgcatcatccgcaaaaagagcatccagtttttccaactcagccagaataagcgcgcgttgcggatggtccgtcgccagcgccatttcataatagggtgcaacggcaaaagcgcccggtaacggctggttgttatttaacaaatcgtgcattcgcgggatcagcacccactgcaaccactccagtggttccatggtgtccataaagaacggttgggtactattaaattgatgcggctggggttcatcgtttcgccagtgctgatgttcacgcagtaacgcttcaagcgcctgcaactggagacgaacgcggtcatgagtggtcataaagcaacctcaataagaaaaactgccgcgaaggatagcaggaataaaaaaagggagcactgtattcacagtgctcccggttcgtttcgcagcattccagctacttttgttgctccctgctcatccttgacaacttttcctctggccatgcggccaatcgttcatcctgaactattgcttcctgctcacaccaccccgatgtgatacttcatcctgaagtgtcccaggccttcctgacccaccgaatcatcctgaccggttctcattctccatcctggaggtgtcctttaacgcgtcctgcgtcatcctcttcgcttcatccagaagcctttccctgaaacaccatcctggtgtgtccttcagaagtgtcatcatcctgatgttcacttcgttgtctgactccctgtcgacgaagatagaatcgtctttttcgcgaactcttacaaggcgcttacagacaatgccttaaggaaaatttcatatgaaagttaggaattaacaagcaacnnnntgtttttaaatgaaaataacgattcttatctttttaagtattcgcttatttcctggcgatctcctacagagtctgtaagagatctctcacaaccagatggggtatttggattacagaagaggcttaagttgattaaggaattccgcaagatttggggctaaatgcgtccgtttacgtgttcccagcgtctctttacacacttcaccggagagattacacaccgagatgacctctaactcttcttccagcgtcgcgataaatagcgtgggtggcagttttagccttttctgagtcaccagatgaccaatcagattttcctgcacccgacggaagtcgtcttcactccaggtttgcagcaatgtcagtttgatatcgccaaactgcgcgtgcatatccccggcaaactgagtcgtataaaaggtatgaattgtgggttgtatcacaatatcaaaagcgcgttcaaccgcgtttacattttgttccccggtaaacggctggggttgccagtatacggcatcttcagtagttgaaataatgcacggtgaaggaacgccgtacagttcctcacttaacggccagcttttatgctcttcatgccacgcatcgcagtagcgtgcagtaaaatctttcagggcttgtgcggtcaaatcgtccactaatttctctcttcacttaaaccagatacacttgtcgtttagtttatctggtttatgacggtgaaacatgtcttcttatgcaaaccatcaggcacttgcgggcctgactcttggaaaatcaaccgattaccgggagacctatgacgccagcctactgcaaggcgttccacgcagcctgaatcgcgacccgctgggtctgaaagcggataacctgccttttcaaggtacggatatctggacgctgtatgaactttcctggctgaatgcgaaaggtttgccgcaggtcgctgtcggtcatgttgaacttgattacaccagcgtaaatctgattgagtcgaagagttttaagctctatctcaacagttttaaccagacgcgttttaataactgggatgaggtgcgccagacgctggagcgcgacttaagcacttgcgctcagggtgaggttagcgtggcgttatatcgtcttgatgaactggaaggccagccgataggtcatttcaatggcacttgcattgatgaccaggatatcactatcgataactatgaattcactactgactatctggagaatgccaccagtggtgaaaaagtagtggaaganacgctcgtcagccacctgctgaaatcaaactgcctgatcacccatcaaccagattggggttcgatccaaattcagtatcgtggacgccaaattgacagagaaaaactgctgcgttacctggtctcattccgtcatcacaacgagttccacgaacagtgcgtggaacgcatctttaatgacctgttacgcttctgccagccagagaaattgagcgtttacgcacgttatacccgtcgtggcggtctggacattaacccgtggcgcagtaatagcgattttgtcccatcgaccacaagactggttcggcaataaattttttctcaattttgcgtgctggattcacgcagaaggttgtgaaaggtcatcaggcagggctattgtaatcaaagggaatgacgatattcgtcccataaggagtttttcttgattacacatattagcccgcttggctccatggatatgttgtcgcagctggaagtggatatgcttaaacgcaccgccagcagcgacctctatcaactgtttcgcaactgttcacttgccgtactgaactccggtagtttgaccgataacagcaaagaattgctgtctcgttttgaaaatttcgatattaacgtcttgcgccgtgaacgcggcgtaaagctggaactgattaatcccccggaagaggcttttgtcgatgggcgaattattcgcgctttgcaggccaacttgttcgcggttctgcgagacattctcttcgtttacgggcaaatccataataccgttcgttttcccaacctgaatctcgacaactccgtccacatcactaacctggtcttttccatcttgcgtaacgctcgcgcactgcatgtgggtgaagcgccaaatatggtggtctgctggggcggtcactcaattaacgaaaatgagtatttgtatgcccgtcgcgtcggaaaccagctgggcctgcgtgagctgaatatctgcaccggctgtggtccgggagcgatggaagcgccgatgaaaggtgctgcggtcggacacgcgcagcagcgttacaaagacagtcgttttattggtatgacagagccgtcgattatcgccgctgaaccgcctaacccgctggtcaacgaattgatcatcatgccggatatcgaaaaacgtctggaagcgtttgtccgtatcgctcacggcatcattatcttccctggcggtgtgggtacggcagaagagttgctgtatttgctgggaattttaatgaacccggccaacaaagatcaggttttaccattgatcctcaccggcccgaaagagagcgccgactacttccgcgtactggacgagtttgtcgtacatacgctgggcgaaaacgcgcgccgccattaccgcataatcattgatgacgccgctgaagtcgcccgtcagatgaaaaaatcgatgccgctggtgaaagaaaatcgccgtgatacaggcgatgcctacagctttaactggtcaatgcgcattgcgccagatttgcaaatgccatttgagccgtctcacgagaatatggctaatctgaagctttacccggatcaacctgttgaagtgctggctgccgatctgcgccgtgcgttctccggtattgtggcgggtaacgtaaaagaagtcggtattcgcgccattgaagagtttggtccttacaaaatcaacggcgataaagagattatgcgtcgtatggacgacctgctacagggttttgttgcccagcatcgtatgaagttgccaggctcagcctacatcccttgctacgaaatctgcacgtaatctcccctcccccggtgacgtttgttgccgggttttctcgtttttggtcacttactcatcaactcatttcatttgttatatgaatgtttcttaccaccctcacgcgacaaatatcatcacagttaatatgtcatacaatttatattgcaacgcaaacgtttccctattttcataaaccgtattttatcgctatgaaaaagaaattatcgccatgattaactaaaagtattgattttttcagttcaacctacatatattgcgcgccccggaagaagtcagatgtcgtttaatgggcaaatattgcccttaaattctcttttacttttgatttacagagtaaagcgttgggataatctatcttccaagnagattattgtatttgggatcaagatcactgatagatacataacttgtgtgtatctttccgccctcaaattattacggcggtaaatgattaagccatcgccgatagacagatttcatttttacggtcaggcaccttcccgggctgaactggctaaaagctgaattatttgcattcctccaggagaaatagatggaaacgactcaaaccagcacgattgcgtcgaaagactctcgtagtgcctggcgcaagacagacaccatgtggatgctgggcctttacggcacggcaatcggcgcgggcgtgctgttcctgccaatcaacgccggtgttggcggtatgatcccgctgatcatcatggctatccttgcgttcccgatgacgttttttgctcaccgcggcctgactcgcttcgtactgtctggtaaaaacccgggcgaagacattaccgaggttgtagaagaacactttggtattggcgcaggtaaactgattaccctgctctacttcttcgctatctacccgatcctgctggtttatagcgtggcaatcaccaatacagttgaaagcttcatgtctcaccagctgggtatgacaccaccgccgcgtgcgattctgtcgctgatcctgatcgtgggtatgatgaccatcgttcgctttggtgaacagatgatcgttaaagcgatgagtattctggtattcccgtttgttggcgtactgatgctgctggctctgtacctgatcccgcagtggaacggcgcagcactggaaacgctgtctctggacactgcatctgcaaccggaaacggtctgtggatgaccctgtggctggcaattccggtaatggtgttctcgttcaaccactctccgatcatctcttctttcgccgttgcgaagcgtgaagagtacggcgatatggcagaacagaaatgctcgaagatcctggcattcgcacacatcatgatggtgctgaccgtaatgttcttcgtcttcagctgcgtactgagcctgactccggcagacctggctgcggctaaagagcagaacatctcgattctgtcttacctggctaaccactttaacgcaccggttatcgcgtggatggctccgattatcgcgattatcgctatcaccaaatccttcctcggccactacctgggcgcacgtgaaggcttcaacggtatggtgattaaatctctgcgtggtaaaggtaagtctatcgaaatcaacaagctgaaccgtatcactgcgctgttcatgctggtaacgacctggattgttgccaccctgaacccgagcatcctgggtatgattgaaaccctgggcnnnncaatcatcgcgatgatcctgttcctgatgccgatgtacgcaattcagaaagtaccggcaatgcgtaagtacagcggtcacatcagcaacgtattcgttgtcgtgatgggtctgattgcaatctccgcaatcttctactctctgttcagctaagtcctttcgcgccgctttcgggcggcgcttcctccgttttaacgcgatgtatttcctatgattagcgtattcgatattttcaaaatcggcattggcccttccagttctcataccgttggaccaatgaaagcgggtaaacaatttaccgacgatctgattgcccgtaacctgcttaaagacgtgacccgcgtggtggttgacgtgtacggctcgctctctctgactggtaaaggccaccacactgatatcgccattattatgggcctggcgggtaacctgccggataccgtggatatcgattccatccctggttttattcaggatgtgaatactcatggtcgcctgatgctggcaaacggtcagcatgaagtggagttcccggttgatcagtgcatgaacttccatgccgacaacctttctctgcatgaaaacggtatgcgcattaccgcgctggcgggtgataaagtcgtttacagtcagacttactactctattggcggtggctttatcgttgatgaagagcattttggccagcaggatagcgcaccggttgaagttccttatccgtacagttcagcagccgatctgcaaaaacattgtcaggaaaccgggctgtcactctctggcctgatgatgaaaaacgagctggcgctgcacagcaaagaagagctggaacagcacctggcgaacgtctgggaagtgatgtgtggcggtattgagcgcggtatttccaccgaaggtgtgttacctggcaaactgcgtgttccacgccgtgctgcggcactacgccggatgctggtcagccaggataaaaccaccactgacccgatggcggttgttgactggatcaacatgtttgcactggcagtgaacgaagagaacgctgctggcggtcgcgtggtgactgcgccgactaacggtgcgtgcgggattatcccggcagtgctggcgtactacgataagtttatccgcgaagtgaacgctaactcactggctcgttacctgctggtagccagcgccattggttctctttataagatgaacgcgtcgatttctggtgccgaagtgggttgccagggtgaagttggtgtggcgtgctcaatggcggcggctggtctggcagaactgttaggtgcaagcccggcgcaggtgtgcatcgcggcggaaatcgccatggagcacaacctcggtctgacgtgtgacccggtcgccggacaggtacaggtgccatgcatcgagcgtaacgccattgcggcagtaaaagcggtgaacgccgcacgtatggcgctgcgccgtaccagcgagccgcgcgtctgcctcgataaagttatcgaaaccatgtacgaaacaggtaaagatatgaacgccaagtaccgcgaaacctctcgcggcggcctggcaatgaagatcgttgcctgcgattaatcgctctccagaggcctcgttttgcgaggcctcttcccgatttctcatccagccatagcctgttccagtatcgaatgttacccttatcgcctgatctttaagggggttatcgtggctgttcatttgcttattgtcgatgcactgaatcttattcgtcgcattcatgccgttcaggggtcgccctgtgtcgaaacctgccagcatgcgctcgatcagctcattatgcacagccagccaacccacgcggtcgccgtttttgacgatgaaaaccgcagtagcggctggcgtcatcagcgtttaccagattacaaagcgggtcgaccgccaatgccggaagagttgcacgacgagatgcctgcattacgcgccgcctttgagcaacgcggcgtcccgtgctggtcaaccagcggcaacgaagccgatgacttagccgccacgctggcggtcaaagtgacacaggccgggcatcaggcaacgattgtttcgacagataaaggctactgtcagttactttcaccgacattacgtattcgtgattacttccagaaacgttggctggatgcgccatttatcgataaagaatttggcgttcaaccgcagcagttgcccgattactggggacttgcggggatcagcagttcaaaggtaccgggtgttgcgggaatcggaccaaaaagcgccacgcagctgctggtcgagtttcagagtctggaagggatatatgagaatctggatgcggttgccgaaaagtggcgcaaaaaattagaaacccataaagagatggcgtttctgtgccgcgatattgcccgcttacaaaccgatttgcatatcgacggcaatttacagcaattgcggttggtacggtaacggngtgccggatacgccgcaaacgtcgcatccggcattatcacatcagcgcatttaccaggcggtatggtaaagntctacaatatcctcaagcgttgcttcacgcgggttgccaccggtacaaacatcatccagtgccgcctgcgccagtgccggaatgtcttccttgcgtacaccaacatcacgcaaatgtggcggaataccgacatcacggttgagagcaaacaccgcttcaacagcggcattacgcgcctcttccaggctcataccttccactttcacgcccataacg

SEQ ID NO: 1465 - DNA, 7492 bp, Escherichia coli
  Strain O55:H7
  modified_base (335)..(335): a, c, g or t
  modified_base (2451)..(2451): a, c, g or t
  modified_base (2599)..(2599): a, c, g or t
  modified_base (4982)..(4982): a, c, g or t
gatatcgcggtacttctcaccggtaaagtcagcgttataacgcatgacatgcggtaacaggatggcgtttgcaacaccgtgtggagtgttataaaacgcgcccagtggatgcgccataccatgcaccaaccctaaccccacattcgagaagcccatacccgcaacatactgcccgagcgccatttcttctccggcatccttatcaccagcaaccgatcctcgcagcgccccagcaatgatttcaatcgctttaatgtgcagtgcatcggttagcgcccacgcgccacgggtaatatacccctcaatagcatgagtgagcgcatcgacacccgtcncagctttcagcgctggaggcataccatccatcatgtcagcgtcaataaacgccacctgcgggatatcatgcggatcaacgcaaacaaacttgcgccgtttttcttcgtcagtgatcacgtagttaatggtcacttctgccgcagtgcctgctgtggtggggattgccagaatcggtacactgggtttattggtcggggaaagtccttccaggctacgcacatcggcaaactccgggttgttgctgataatgccaatcgctttacaagtatcctgtggagaaccaccaccaatagcgatcaggtaatccgcgccgctattctggaatacaccgagcccttctttgacgacagtaattgttgggttgggcactacgccgtcgtaaatcgcccatgccagccctgcagcatccatcttatcggtcactttcgccaccacgccgcattgcaccagcgttttatcggtgacgatcagcgccttctgataaccacggcgtttcacctcatcggttaaagccccaacagcaccccgaccaaaccatgccgtttcgttcagaatcattctgttagccatcatccttctccttgttgctttacgaaattactcttcaatccgtaacccataggttttgaatttctccagcactacggcaatctcttcatcgctcagcactggcaccgggtccgtaatcgccagggtcgtcaggtaaagttgcgccagcacttcaacttcatgcgccagccataacgctttttccagattcacctcacaagcgataagcccatgatgttgtaacaaagttgccttacgatttttgagagccagcgcaacatgttcagaaagttcgcgtgttccaaaggtcgcataaggcgcgcaaggaatagaattaccgccagccgccgcaatcatgtagtgaatagcggggatcggtcggttaagaatggaaactgctgtgcaatgaacggcatgattgtgaacaaccgcgttggcatccggtctgctttgataggccgccatatggaaacgccactcgcttgaggggagctttccttcctcatgtttaccgttgccatcaataaagacaatatgcgactccgtcagtttttcatatggaatgcctgtaggcgtaatcagcatcccatcctgataacgtacactgacgttccccgctgtcccctggttcagtcccaggcgggtcatttccaggcaagtgtcaataatctgacgagcaagtttatttcgttccattagctacctctctctgattcaaaacagggcaataatgttgttcctttcacactattgaattagccgtttaattacccaccatcttcttcctgattaacaagaaagaaattcacaagcttatattttgtgacctagttcaactaatcacagtaaataactgcaagttctctttttataaccccattaaaaatgaccgctcttaaaaatatttatcaaaacggtcatttttctattcacccaagccaggaatgcccgttttcggcataaacaattaatacggtcatctggtttgtgttttttatgatttattttctgaaacgggcatgaaatttcgattattaaagtgatggtagtcacataaagtcaccttccagctaataagtgtgaccgccgtcatattacagagcgttttttatttgaaaatgaatccatgagttcatttcagacaggcaaatattcactgatatgaagcccgaactcgctggttttgcacttttgaaaacataaccgattacgtgcttaagcttctgaacctaagaggatgctatgggaaacacatcaatacaaacgcagagttaccgtgcggtagataaagatgcagggcaaagcagaagttacattattccattcgcgctgctgtgctcactgttttttctttgggcggtagccaataaccttaacgacattttattacctcaattccagcaggcttttacactgacaaatttccaggctggcctgatccaatcggccttttactttggttatttcattatcccaattcctgctgggatattgatgaaaaaactcagttataaagcaggaattattaccggattatttttatatgccttgggtgctgcattattntggcccgccgcagaaataatgaactacaccttatttttagttggcctatttattattgcagccggattaggttgtctggaaactgccgcaaacccttttgttacggtattagggccggaaagcagtggtcacttccgcttaaatcttncgcaaacatttaactcatttggcgcaattatcgcggttgtctttgggcaaagtcttattttgtctaacgtgccacatcaatcgcaagacgttctcgataaaatgtctccagagcaattgagtgcgtataaacacagcctggtattatcggtacagacaccttatatgatcatcgtggctatcgtgttactggtcgccctgctgatcatgctgacgaaattcccggcattgcagagtgataatcacagtgacgccaaacaaggatcgttctccgcatcgctttctcgcctggcgcgtattcgccactggcgctgggcagtattagcgcaattctgctacgttggcgcacaaacggcctgctggagctatttgattcgctacgctgtagaagaaattccaggcatgactgcaggctttgccgctaactatttaaccggaaccatggtgtgcttctttattggtcgtttcaccggtacctggctcatcagtcgcttcgcaccacacaaagtcctggccgcctacgcattaatcgctatggcactgtgcctgatctcagccttcgctggcagtcatgtgggcttaatagccctgactttatgcagcgcctttatgtcgattcagtacccaacaatcttctcgctgggcattaagaatctcggccaggacaccaaatacggttcgtccttcatcgttatgaccatcattggcggcggtattgtcactccggtcatgggttttgtcagtgacgcggcgggcaacatccccactgctgaactgatccccgcactctgcttcgcggtcatctttatctttgcccgtttccgttctcaaacggcaactaactgaacatattttccgaataaagtgaggaatctgtaatgaacaaaatcagcttaccgaaaattggtatccgcccggttattgacggtcgtcgcatgggtgttcgtgagtcgcttgaagaacaaacaatgaatatggcgaaagctacggccgcactgctgaccgagaaactgcgccatgcctgcggagctgccgtcgagtgtgtcatttccgatacctgtatcgcgggtatggctgaagccgctgcttgcgaagaaaaattcagcagccagaatgtaggcctcaccattacggtaacgccttgctggtgctatggcagtgaaaccatcgacatggatccaacccgcccgaaagccatttggggctttaacggcactgaacgtcccggcgctgtttacctggcagcggctctggcagctcacagccagaaaggcatcccggcattctccatttacggtcatgacgttcaggatgccgatgacacatcgattcctgccgatgttgaagaaaaactgctgcgctttgcccgcgccggtttggccgtcgccagcatgaaaggtaaaagctatctgtcgctgggcggcgtttcgatgggtatcgccggttctattgttgatcacaacttctttgaatcctggctgggaatgaaagtccaggcggtggatatgaccgaactgcgtcgccgtatcgatcagaagatttacgacgaagccgaactggaaatggcactggcctgggctgataaaaacttccgctatggcgaagatgaaaataacaaacagtatcaacgcaatgccgagcaaagccgcgcagttctgcgcgaaagtttactgatggcgatgtgtatccgcgacatgatgcaaggcaacagcaaactggccgatattggtcgcgtggaagaatcacttggctacaacgccatcgctgcgggcttccaggggcaacgtcactggaccgatcaatatcccaatggtgacaccgccgaagcgatcctcaacagttcatttgactggaatggcgtgcgcgaaccctttgtcgtggcgaccgaaaacgacagtcttaacggcgtggcaatgctaatgggtcaccagctcaccggcaccgctcaggtatttgccgatgtgcgtacctactggtcaccagaagcaattgagcgtgtaacggggcataaactggatggactggcagaacacggcatcatccatttgatcaactccggttctgctgcgctggacggttcctgtaaacaacgcgacagcgaaggtaacccgacgatgaagccgcactgggaaatctctcagcaagaggctgacgcttgcctcgccgctaccgaatggtgcccggcgatccacgaatacttccgtggcggcggttactcttcccgcttccttaccgaaggcggcgtcccgttcaccatgactcgtgtcaacatcatcaaaggcctgggaccggtactgcaaatcgcggaaggctggagcgtggaattgccgaaggatgtgcatgacatcctcaacaaacgcaccaactcaacctggccaaccacntggtttgcaccgcgcctcaccggtaaagggccgtttacggatgtgtactcggtaatggcgaactggggcgctaaccatggggttctgaccatcggccacgttggcgcagactttatcactctcgcctccatgctgcgtatcccggtatgtatgcacaacgttgaagagaccaaagtgtatcgtccttctgcctgggctgcgcacggcatggatattgaaggccaggattaccgcgcttgccagaactacggtccgttgtacaagcgttaatacattactccctgatgtgatgcccggtcgctccggctgccgggcctgaacaagcaagagtggttagccggataagcaatgttatccggctatattgcaggagcgatcatgaaacaagaagttatcctggtactcgactgtggcgcgaccaatgtcagggccatcgcggttaatcggcagggaaaaattgttgcccgcgcctcaacgcctaatgccagcgatatcgcgatggaaaacaacacctggcaccagtggtctttagacgccattttgcaacgctttgctgattgctgtcggcaaatcaatagtgaactgactgaatgccacatccgcggtatcgccgtcaccacctttggtgtggatggcgctctggtagataagcaaggcaatctgctctatccgatcattagctggaaatgtccgcgaacagcagcggttatggacaatattgaacggttaatctccgcacagcggttgcaggctatttctggcgtcggagcctttagtttcaatacgttatataagttggtgtggttgaaagaaaatcatccacaactgctggaacgcgcgcacgcctggctctttatttcgtcgctgattaaccaccgtttaaccggcgaattcactactgatatcacgatggccggaaccagccagatgctggatatccagcaacgcgatttcagtccgcaaattttacaagccaccggtattccacgccgactcttccctcgtctggtggaagcgggtgaacagattggtacgctacagaacagcgccgcagcaatgctcggcttacccgttggcataccggtgatttccgcaggtcacgatacccagttcgccctttttggcgctggtgctgaacaaaatgaacccgtgctctcttccggtacatgggaaattttaatggttcgcagcgcccaggttgatacttcgctgttaagtcagtacgccggttccacctgcgaactggatagccaggcagggttgtataacccaggtatgcaatggctggcatccggtgtgctggaatgggtgagaaaactgttctggacggctgaaacaccctggcaaatgttgattgaagaggctcgtctgatcgcgcctggcgcggatggcgtgaaaatgcagtgtgatttattgtcgtgtcagaacgctggctggcaaggagtgacgcttaataccacgcgggggcatttctatcgcgcggcgctggaagggttaactgcgcaattacagcgcaatctacagatgctggaaaaaatcgggcactttaaggcctctgaattattgttagtcggtggaggaagtcgcaacacattgtggaatcagattaaagccaatatgcttgatattccgttaaaagttctcgacgacgccgaaacgaccgtcgcaggagctgcgctgttcggttggtatggcgtaggggaatttaacagcccggaagaagcccgtgcacagattcattatcagtaccgttatttctacccgcaaactgaacctgaatttatagaggaagtgtgaaatgctgaaaacaatttcgccgttaatttctcccgaactattgaaagtgctggcagagatgggacatggagatgaaattattttttccgatgctcactttcccgcccattcgatgggaccgcaggtgatccgcgctgatggcctgttggtgagcgacttgctccaggcgattatcccgttatttgagctggacagttatgcaccgccgctggtgatgatggcagcggtagaaggtgacactctcgatcctgaagtagaacgacgttaccgtaatgcgctttcactacaagccccgtgtcctgacatcatccgcatcaatcgttttgcgttttatgaacgggcgcaaaaagcctttgcgatcgttatcacaggcgaacgagcgaagtacgggaatattcttttaaaaaaaggggtaacaccgtaatctcataccggtacgcccgcatgacgcgggcggttatcgaatgatggggtgaaaaatatgaaagcggcacgccagcaagcgatagtcgacctgctgctgaaccataccagcctgaccacggaagctctctctgaacagctaaaggtcagtaaagaaaccattcgtcgcgatctcaatgaattacagacgcagggtaaaattctgcgcaatcatggacgcgctaaatatatccaccgtcaaaatcaagacagtggcgatccctttcacatcaggctgaaaagccattatg

SEQ ID NO: 1466 - DNA, 3491 bp, Escherichia coli
  Strain O55:H7
  modified_base (1100)..(1100): a, c, g or t
  modified_base (1568)..(1568): a, c, g or t
  modified_base (3347)..(3347): a, c, g or t
agcagatatcgcgcgcgaggcgctcgcgtggattgaagaagggatggtgatagccttagacgccagttcaacttgctggtatctggcacgccagttgcctgacatcaacattcaggtcttcaccaatagccatccgatttgccatgaactcggtaaacgcgaacgcattcaactgatcagttccggcggcacacttgagcgcaaatatggctgttacgtcaatccctcgctgatttcccaacttaaatcgctggaaatcgatctgtttattttttcttgtgaagggatcgatagcagcggcgcactgtgggactccaatgctatcaacgctgattacaaatcaatgctattaaaacgcgccgcgcaatcgttgttattgattgataaaagtaaatttaatcgttcaggggaagcccgcatcgggcatctggatgaggtaacgcacattatttctgatgaacgccaggttgcaacttctttggtaacaggctgacggaaagggtagcaggccggagacgacgccccggccttgcctgttatcgctcgtcgcgacgaccacccaccgcagcccagatacggcggacgtgcaccgtcacttcttcgcgatcgtgatacaactgccgcgcctgaatctgagcatttatgccatgttcatcaagctgtgcctgaatatacgccagattgtgtgacacttcttcgtagcgttttttcatcggcagtttgaggttgaaaatggtttcacgacaccagccattaaccagccactgcgccatcaatgccgcaactttcgccggtttttcaaccatatcgcataccatccaggagatattgctgcgcgtcggacggaatttgaaaccgtcttcccgcagccacgtcacctgtccggtatccatcagactttgcgccatcgggccgttgtcgacggaataaacccacatgttgcgcttcaccagttggtaggtccagccgccagggcaagcgcctaaatccaccgcccacatcccgttcgccaggcgttcatcccactcatccgcaggaataaacacatgaaatgcctcttccagtttgagcgtggaacgactcggcgcatctgccggaantttcaggcgcggaatgcccatatagaacggcgaattattgttgctgtatgagtaaccggtatagcagcagcctggtgcaataaagaatacatgcacaaccggacgcttcggcgtttcatagttcgccagcaccccggcatcgcgcaaggcagcgcgtagcggcacggtgaatttacggcagaatttcagcaactctttgctttcgttggtatcggcaacttcaacacgcagttcaccgcccttctctactacgccctgcaacatgccgacaatgggggtaatacgatcttctggcggcaaatgctgcaagagttcccccaccacaaaccactggcgggcaaaaattaatgaactgaacggcagctcacggattaacttatcgccatcatcaggttgataacattcataaatgacataacccgcattctctttcacgcgggcaaaaccgaaaatctcccgctggccggntttatcggtaatttctgcggcgcactctttttcaaagcccggacggcacagcaatacaaccttattcatgacttacgcccttgcgctttaaacggatagcaccaactaacattaacgcccagcccgcaaggaagctcacgccgccaaccggagtgacaaacgcccacaaacgcagatgggacagtgccaggcaataaaggctgccgctgaacagcaccgtgcctaacgcgaggaaaacgctactccagtaaaaccagatactgatgcgacgctgcattgccaccgccagacctaagatcgccagcgtatgaaacgcctggtattcgaggccggtctggatccagcccatctcaacggcccccatggttttacttaacacatgcgcgccaaaagcgcccagtgccacaaaaatgaagccgctaatggcggcgaaaatcagcataaaacggctggtcatggtcgtaccctacgtaaattattgttcataacgaaagcggaatttttcttgttcagcagcggctttcgccaggatccattggcgaaaggcggctattttacccagttctgcctggctgtcatgacaaaccagataaaaagcgtttttactgaccagaacatcattaaacgggcaaacaagacgtccggcttcaatttcagattgcgccatcacgttatttgccagcgccactccctgcccgtgaatagccgcttgcagcaccatggcgctatggctaaaaattggcccttgctgaacgttgatatgatttaaccccaattgacgagtatatgtctgccagtcacggcgtgacgcatcatgtaataacgtatgtttagccagatcttccggggtcttcaagggtttttcgccagtcagcagtagcggcgaacacaccggcaataaatattcggcgtacagtttttccacccgtagccccggccagttgccccgaccataaaatatcgccacatcaacatcatccgccagcttatcttcctgacgatcaaccgcctggattcgaacgtcaattcccggataagctgaattaaagctggaaagtcgcggaaccaaccaatgaatggcgaaactggggagtaaactgaccgtcaacgcccccttggcgctacgggcctggagtttacgcgtcgcttcggttaattgcgaaaatatctctttgatatcgaggaaatagctttgcccttcctcggtcagcaggagtgaacgattacggcggcggaacagttttagccccaaaaaatcctcaagagacttgatttgatgacttactgcggcctgggtcacaaaaagctcttctgctgcgcgagtgaaacttaaatggcgtgctgcggcatcaaaaactcgtaaggcatttagcggtggtaatcgtttagacatggcttttaaactttgatgttaaatgaatttaacaattagatcacactgtgtaacctattagtttttttaatctgagccattataaattgtccgttgagcttctaccagcaaatacctatagtggcggcacttcctgagccggaacgaaaagttttatcggaatgcgtgttctggtgaacttttggcttacggttgtgatgttgtgttgttgtgtttgcaattggtctgcgattcagaccatggtagcaaagctaccttttttcacttcctgtacatttaccctgtctgtccatagtgattaatgtagcaccgcctaattgcggtgcttttttttaccttgcgatcgcgaattactgatccagttcgaccatctctttcacgtcggnacggttgatctgctgtttgttgccattagcgtctttatacgaaatcataccggtatcgttatcagtctgtggtttgccgtcagagacgatggtacgtccgtcattggtgtgcatcacatagttcgaaccggaacaggcgctcag

SEQ ID NO: 1467 - DNA, 4311 bp, Escherichia coli
  Strain O55:H7
  modified_base (960)..(960): a, c, g or t
  modified_base (1081)..(1081): a, c, g or t
tcagcatacaggcagaaataattgcggcagtctttttcatcatcttctccttaaagcgattaataaatcttaatagtattgattaacaggctaaaattaacgcctaacactattcagcatatgttactgacgcggcttcgccaggatatccagataattctgatggttagcactctccttgtatcaaagtgaattttgcgtcacgatcggtgcatcaagccgaggagcaccatgaacgtttttaatcccgcgcagtttcgcgcccagtttcccgctctacaggatgcgggcgtctatctcgacagcgccgcgaccgcgcttaaacctgaagccgtggttgaagccacccgacagttttacagtctgagcgccggaaacgtccatcgcagccagtttgccgaagcccaacgcctgaccgcgcgttatgaagctgcacgagagaaagtggcgcaattactgaatgcaccggatgataaaactatcgtctggacgcgcggcaccactgaatccatcaacatggtggcacaatgctatgcgcgtccgcgtctgcaaccgggcgatgagattattgtcagcgtggcagaacaccacgccaacctcgtcccctggctgatggtcgcccaacaaactggagccaaagtggtcaaattgccgcttaatgcgcagcgactgccagatgtcgatttgctgccggaactgattactccccgtagtcggattctggcgttgggtcagatgtcgaacgtaactggcggttgcccggatctggcgcgagcgattacctttgctcattcagccgggatagtggtgatagttgatggtgctcagggggcggtgcatttccccgcggatgttcagcaactggatatcgatttctatgctttctctggtcacaaactgtatggcccgacgggtatcggcgtgctgtatggcaaatcagaactgctggaagcgatgtcnccctggctgggcggcggcaaaatggttcacgaagtgagttttgacggcttcacgactcaatctgcgccgtggaaactggaagcaggaacgccaaatgtggctggtgtcataggattaagcncggcgctggaatggctggcagattacgatatcaaccaggccgaaaactggagccgtagcttagcaacgctggcggaagatgcgctggcgaaacgtccaggctttcgttcattccgctgccaggattccagcctgctggcctttgattttgctggcgttcatcacagcgatatggtgacgctgctggcggagtacggtattgccttgcgggccgggcaacattgcgctcagccgctactggcagaattaggcgtgaccggcacactgcgcgcctcttttgcgccatataatacaaagagtgatgtggatgcgctggtgaatgccgttgaccgcgcgctggaattattggtggattaatgacgaacccgcaattcgccggacatccgttcggcacaaccgtaaccgcagaaacgttacgcaataccttcgcaccgttgacgcaatgggaagataaatatcgccagttgatcatgctggggaaacagcttccggctttgccagacgagttaaaagcgcaggctaaagagattgccggatgcgaaaaccgcgtctggctgggatataccgtggctgaaaacggtaaaatgcacttctttggcgacagcgaaggacgtatagtgcgcggcctcctggcggtgctgttgactgccgttgaggggaaaaccgccgccgaattgcaggcacagtcgccgctggcattgtttgatgagctgggattgcgtgcgcaacttagcgcctcacgcagccaggggttaaatgcgttaagcgaggcgattatcgctgcgacgaagcaggtttaagcacagaaccgggtcggataagacgtttgcgtcgcatccgacctgattgtttacccctgacgcgccgctttcgccatcatcttcttcagcgcatgagaaaccgcaacaaaaccaaaggtggcggtcaccatcgttgccgcgccaaatccagatgcacaatccatccgctttggtccttccgccgtggctttcatcgcacacaccgtaccgtctgactgcggatacaccaatgcttcggtagagaacacgcaatccacaccgagcttacctttactgtttttcactacgccaaaatcgcttttcaggcgctcacgcaacttcgccgccagcgggtcctgaatcgttttcgccagatcggtaacctgaatctgcgttgggtcaatctgcccacccgcgccaccggtcgtgaccagcgggattttattgcgccgacaataagcaatcagcgccgctttgggccgtacactatcaatggcatcaatcacgtacgaataacccacgctcatatgctgcgctacgttatccggcgtcacgaaatcatccaccaccgttacacagcactccgggttaatctggcgaatacgttccgccatgacttccgcttttgccagcccaacgttatcgcgcagggcatgaatttgccgattggtattggtgacgcacacatcatccatatcgataagcgtgattgcgccaatccccgtgcgcgccagcgcttccgccgcccaggaaccgacaccgccaataccgaccacacaaatatgcgcgtcagcaaacagttgcaacgctttttcaccatacagacgcgctgtgccaccaaaacgctgacgccatgcatcactaattaccacagacatagcacctcagaattaaaaagggcgaggttatccctcaccctaaacgcataaatgcctgatgcgctacgcttatcaggcctacataactcctgcaatattttggatttgcatgatttgtaggccggataaggcgttcacgccgcatccggcatgaacaacgcgcacttagtcaataatcaggatgtgaggttacccctcaccctgtcatatccgtaaaaacggcatacagaatatcacatcagccgctaaagacgttacctgcgcccggggcggttttcagcacccagacacgtccatagtggttgtaccaacctgcgcggtgtccggcttccggcccgatcccttgataaatatcgaagtgttggcctttgattgcgccaccgacatccaacgccaccatcagacgcaattcgtactgaccgttaaatttgccgttattatccagcagcggcacttctgccagcaaggttgtacctggtgggataatggaacgatcagaggcaacagaagcacggccaaccagcggcaccgcacttgcccctttcaccggtgcaaaagattgcggtttaaagaaaacgaaagacgggttctgttccagcagctcgcgaacctcggcttcactgtgtgtttcgccccaatgacgaatcgcctgcatcgacatatcttcttttttcacttcgccacggtcgatcagcaccttaccaatgctgcgataggcatgaccgtttttccctgcatagctgaaaaagttaagcggactgccatcaccaaagtcgatatacccactaccctgcacatccataatgaaattatccatcagagagttgctgtaagcgaggatgtacttatcgctcaatgcacccgcgtagatctccgcacgagacggcagacgaccacgttttggcggcatacggtaaataggatactggaactcgccctggcgggtatggcgcgcctgaattaccggcgtgtaatagcctgtaaactgcacgttaccatagttgtcggcaccttccatctgccaggcatcaatgccgaactggcgcatattgcgggtatcaccgcctgcgcgcagccactcttgcaccgcgttataaacattactctggttgccatacagacgcggtgacgaattacggatatggttaatttgctcggcaaaatcaccggcgttaatcggcgcgccaacggcatctggctggttcaccagagagaaaggctgggtaaatttcccgtctttatattgctgtccgcgatcggttggtttggaagagcaggcggcaagcattgccacaaccgtgcccataagaaggtactttacccaacgtcctttcattgttctcttcttcaggttaaaaaataaggcgcaacgaagataacaaaccaccgcgtttaatgaaatgagcagcctctccctgacgcaaattttgcacaaaaaataggctttagtgatttgtttttgttcaaaatcatgccagatccgtgatcggggtaaaaaaaaggttgcatgaaaacgcgagcggagtatagtgcgcatccacggacgcggggtggagcagcctggtagctcgtcg

SEQ ID NO: 1468 - DNA, 63 bp, Escherichia coli
  Strain O55:H7
cgtcggttcaaatccggcccccgcaaccaattaaaatttgatgaagtaaagcagtacggtgac

SEQ ID NO: 1469 - DNA, 24831 bp, Escherichia coli
  Strain O55:H7
  modified_base (20)..(21): a, c, g or t
  modified_base (72)..(73): a, c, g or t
  modified_base (861)..(861): a, c, g or t
  modified_base (1147)..(1147): a, c, g or t
  modified_base (1259)..(1259): a, c, g or t
  modified_base (1410)..(1410): a, c, g or t
  modified_base (2089)..(2090): a, c, g or t
  modified_base (2092)..(2094): a, c, g or t
  modified_base (3093)..(3093): a, c, g or t
  modified_base (3120)..(3120): a, c, g or t
  modified_base (5605)..(5608): a, c, g or t
  modified_base (8380)..(8380): a, c, g or t
  modified_base (10965)..(10965): a, c, g or t
  modified_base (14043)..(14046): a, c, g or t
  modified_base (15031)..(15034): a, c, g or t
  modified_base (16801)..(16801): a, c, g or t
  modified_base (21440)..(21440): a, c, g or t
  modified_base (22928)..(22928): a, c, g or t
  modified_base (23189)..(23189): a, c, g or t
  modified_base (23965)..(23965): a, c, g or t
atccggcccccgcaaccaannaaatttgatgaagtaaaagcagtacggtgacgcggggtggagcagcctggnngctcgtcgggctcataacccgaaggtcgtcggttcaaatccggcccccgcaaccaattattgaacaccctaacgggtgtttttttgtttctggtctcctataaaaaagcgccattcagcgcctttttatcatccccttctcgccagggtcgccccatcggcaaaatacgctttaattcccgcaagaatagactccgcaacttcctgctggaaggtcgccgttttcagtttacgctcttcctcaacgttactgataaacgccgtttcgaccagaatggagggaatatctggtgcctttagtacggcaaacccggcctgttcaacttgatttttatgcagcttgttgattttaccgagcttattcagcaccgctttaccaaacttaaggctgtcagcaatggtcagcgactgcaccatatcgaacatggtgtggtcgacatagcggtcaccgcttttgctcacgccaccaatcaagtcggaggcgttctgggtttgtgccagatattttgccgcagtactggttgcacctttggttgagagcgcaaacaccgaggaaccgctcggctggcgactggtaaaggcgtcggcatggatagagacaaacaggtcagcacgctgtttctgagcttttgctacgcgcacttgcaacggaatgaagatgtcttcattgcgcgtcatgtacaccttcatattgccctctttctcgatcagagagcgcaaacggcgagctatttgcaataccacatctttttcgcgcgttttgtatttccccaccgcaccggagtcttngccaccgtggccagggtcaagcataatgacaatcggacgatcgcgccctgctttacctggttgtggaccactttgcgctggcggcacctgcttttcgaggtcgcctttgttgtaatcctccagcagcgccagcagcgggtcctgcatatcctgtgcattggccggatagaggtccatcaccagacgctctttaaacccggcgaccggcgcaagggcaaacagctgcggttttacgttttgctttaattcaaaaaccatccgtacggtttgcgggtcaaattgcccnacgcgcgccgacttgatgaacgggtcgtctgcacgaatttgtgccgccatccccttgagtaccgagttcaggtttacatcttcgatatccaccaccacgcgttccgggttantcaacgcgaactgcttatatttcagctgacgatttgattctaccgtcacgcgggtgtagctggacgcaggccagacgcgcaccgccacgacctggctgaccgcagccagactgacctgacttacgctcaatagccacatggcacccgcgcnttgcagtaaacgacgacggctgattgcagtgttggatcctgacatgcctctcccgagcaaaagaaatctaagctgtgtaacaagtaaacgactaatttgaccggaaactttagcgaaagacgcataatctgtcatctaataaacggtaaacattctttttatattcacgccattactgataaaaaagtcgctctcgcataaaatttacacttgcaccctgcgaaaaaacagaataaaaatacaataaattcgaataataatgcaaagaggtgtgccgtggtaaaggaacgtaaaaccgagctggtcgagggattccgccattcggttccctatatcaatacccaccggggaaaaacgtttgtcatcatgctcggcggtgaagccattgagcatgagaatttctccagtatcgttaatgatatcgggttgttgcacagcctcggcatccgtctggtggtggtctatggcgcacgtccgcagatcgacgcaaatctggctgcgcatcaccacgaaccgctgtatcacaagaatatacgtgtgaccgacgccaaaacactggaactggtgaagcaggctgcgggaacattgcaactggatattactgctcgcctgtcgatgagtctcaataacacgccgctacagggcgcgcatatcaacgtcgtcagtggcaattttattnntnnncagccgctgggcgtcgatgacggcgtggattactgccatagcgggcgtatccggcggattgatgaagacgcgatccatcgtcaactggacagcggtgcaatagtgctaatggggccggtcgctgtttcagtcactggcgagagctttaatctgacctcggaagagattgccactcaactggccatcaaactgaaagctgagaagatgattggtttttgctcttcccagggcgtcactaatgacgacggtgatattgtctccgaacttttccctaacgaagcgcaagcgcgggtagaagcccaggaagagaaaggcgattacaactccggtacggtgcgctttttgcgtggcgcagtgaaagcctgccgcagcggcgtgcgtcgctgtcatttaatcagttatcaggaagatggcgcgctgttgcaagagttgttctcacgcgacggtatcggtacgcagattgtgatggaaagcgccgagcagattcgtcgcgcaacaatcaacgatatcggcggtattctggagttgattcgcccgctggagcagcaaggtattctggtacgccgttctcgcgagcagctggagatggaaatcgacaaattcaccattattcagcgcgataacacgactattgcctgcgccgcgctctatccgttcccggaagagaagattggggaaatggcctgtgtggcagttcacccggattaccgcagctcatcacggggcgaggttctgctggaacgcattgccgctcaggcgaagcagagcggcttaagcaaattgtttgtgctgaccacgcgcagtattcactggttccaggaacgtggatttaccccggtggatattgatttattgcccgaaagcaaaaagcagttgtacaactaccagcgtaaatccaaagtgttgatggcggatttagggtaagcgatgaaaatcgtcggatgcgacatgcgtaacactcgtacgtcgcatccggcaattacgtttattcccgtgaantaaacaacgccgccagaccactgcgcngctcagtacgagtggcgattgccgcacttaatatgcgctcatcggcatacagcgacagacggcgacgcgcgcgggtcaccgcggtataaaccagctctcgcgttactaccggcgtgcgttggctcggtaaaatcaacgccgcatggtcgaactccgatccctgcgatttatgtaccgtcatcgcccacgtagtttcgtgctctggcaagcgactcggttgcacagacttaatattgccgtccggcatcgcaaaccagacgcgcgtcccctgcccgcgatccagcgcaataccgatatcgccattaaacaacccaagcgcgctgtcattacgggcaatcatcaccggtcggccttcgtaccaacgagagtgcggattacgatgaattttgcgcttctgttgcataaactgctcaattcgctcattcagtccagccacgccaaatggcccttcccgcagggcgcacaaaagttggtactcattgaacgcctgaatgattaaatccggctcggcacgcgcttgcagcagatccagataacgtccataacccgcaagagcttcctcaagcatcgcaatataatcttcgccgctctgtaaaagccgtttttcaatatcagtaaaatcctgctgaaaaacggttttcactgccgttttatcaccacggttgatcgccgcagctaactgaccaatgccagaatcgctgccgaaacgatagcttttttgcagcaggcagagactgtcgcgcaaagatgccgcttctgtgccagttcctgccggaacgtgagttcccgtcaggcggcttagctgcccggcacgctcggcggtaaagccggcattggcataagcgcagatatcgcccagcacagccccagcctcaaccgaggccagttgatcacgatcgccgagaaagatcactcgcgcatgatcgggcaaggcgtcgatcagtctcgacatcataggcagatcgatcattgacgcttcatctaccaccagcacatcaagatgcagcgggttaccggcatgatgacgtaaacgctggctacccggctgcgcacccagcaatcggtgcaaagtactggcatcttccggaatacgtttcttttgttcatcggtcagcggtaactgtcgcaaagccttgccgagagattcggttaagcgcgcggcagctttacccgttggtgcagccagacggatacggcagcgttcgccgtcggccatttgaattaacgctgccagcaacttcgctacggtggtcgttttaccggtgccagggccgccggaaatcaccgagatccgccgcgtcagcgccactgctgccgccactttttgccagttaatttcatcaccagtcggaaagagtttatccagggtttgcgccaacaaggcttcatccacctcgatggcatgattcacctcattgaagaagcgcgctaccgtccgctcgttacaccacatgcgattcaaataaagacgatcgccacagaggatcatcggcgtgggttcatctccccggctgaccgcttgtgaagccagcaagcattcttcccaattttgtagctcaccgatttcactgacacaggtcgccaacagcggatgcgactcctcattattttccagtcgtgaaagcggcaaacaaacgtgtccctctccggcatcatgacttaacagtgccgccgcgagggtgacggcaggatgttcatctcccgccacggtcagggcaaactgcacgtccagcgggcgtagctgtttgtgctccacagcttccagtaattgcttttgcaatttcattacgcctcctccagagtcataccggcaaacatctcatccatcaggtcaatcaacccggcgttggggcgggttgtgtaaatcccttgttgcggatgttctttatcaacaccacgcaggaacagataaataacgccgccaaagtggcgctcatagtcgtaatcagcaatgcgatggcgcagataacggtgcagcgccagggtataaagctgatattgcagatcatagcggtgtgcctgcattgccgctgccatagcctgttgggtgtaagccgaactatcttcacccaaccagttggatttatagtcgagcaggtaataacgcccttcgtggcggaacaccaggtcgataaagccttttaacatgccacgtacctgcatgaactccagcggcgggcagccagcggatagcgggtcaaactggcgaattagtgcatcaagctggctggcgatgagcggttcgctaatcggcaggtaaaactccatctccacctgtttatcgcggtcggaaagctgactcaggctaacacccgtttcattgagaggtgcctggaggacagccgtgatccactcggtcaacaccggttcccactgcgattcaaagccgccgagttccagtttttcctgtacccagttcgggtcaaccggctgggtaaaattgaggtcttcaaacaaactgtgcaagaatgtccccggtgacgcnnnncgcgggaactgatgcggtgttaacgtcggttcttcaacgacgctgaccacgcctgcggcatcaacatccagccgtggcatcagatcctgagcgataccgtgaccacgctgctgcaagccggagtagctggtgacacgccagttatcgccgggcaatcgttgtagcgtcctcgcattcagttctgcagttaaagcatcattaacctgccagggctggttatcaccagtttgtgccgtttgccaggcaatatcatcatcgcataacgcttcaatacaggtgcgaagccctgccgcatcttgcggttcccctttttgcagcaaacgcccgagggcactttggtggacgtcggtgtcaccttttttatcgccacgacggcgcaccagcggtgcaacgccgagactgcaatgccaaaccgaacgcgtcagcgccacgtaaagcaaacgcagatcttccgccagacgttcgacctccgcaagatcgacgctttctggcgcagcgttaagatccagaacagcctcaaacgagtggcgatcgtgataaaacgcctgatcctggacgcggaaattggtaataaatggcaaccagaccagcggatattccagcccttttgatttatggatcgtgacaatctgtaccagatgtttatcactttcgaggcgcatttgttggctggaggcattactgtctggctcgaggatatgttgcgataaccagcgtaccagcgcatgttcactttccagctgcgttccggcttcttgtagcagttcgctgatatgcaagatatcggtaagacgccgctcaccgcctgccgttgccagcaagttttctgcaatgttacgcgccgacatcagcgcccgcagcatcggcataacgccacgtttgcgccagatttgccgataaccatcgaactcttcgaccaccgcgtcccacgcatgttcgtcattattcagcgtttcgatatccagcgcgttcagccccatcattgacgttgccagcgcactacgcagggtgttctcacgttcgggcgtcatcaccgcctgcaacaaccaaagcatttcctgcgcttccagagtttcaaaaacactgtcgcggttcgaaaggtaaacggaagggatttccagcaacgttaaggcatcgcgcacctgggcggcctcctggcggctgcgcaccagcacactgatgtccgaagcacgcaccggacgcgcgtcgtcgccgttcatcagcaacgcttcgccccgctgtccggcttgtagccagtcgcgaatttgcgcagcacttacctgcgccatggtactttgatagtcgccaacgccgcagctttcgccttccatcagccacattttcatcgcaggctgcgtttcacctttaaagacaaaacgtaacgcctgatttttcccggctgatttcactggaataaacggtatttcgcgaaacatgaacgcgtcatcagtctggctgaaaagcttgttcacactgttcaccattccaggtgcggagcgccagttggtgtctaaagtgtagtgggcgtgaacttcactacgcgccttcatataagtgaagatatccgcaccccggaatgcatatatggcctgcttcgggtcgccaatcagcaacaatgcggtttccggctgatggtgccagatacggcgaaaaattcggtactgctgggggtcggtatcctgaaattcatcgatcattgccaccgggaatcgcgtacggatcgccgctgccaacacctcaccgctttcgctacgcagcgcggaatcgagccgacttaacatgtcatcaaaacccaattcgccacggcggcgtttttcacgcgctactgtttcgcggatctcagccaatgcgcgggtgatcaccagatcgcggatcgacaatggttctgcaagcagttgatcgatcgcctcaaacagtggatgtcgcggggtttcccccccggccttcgtgcgatcttctaagaaacgctgggagaatttttccagcgactccggcaactgataactgtttgtctcttcttctgcccaggcgctgatcttgtcgatccatttagcctgattgctacggttaaacttgcgtcgatcaataccagaagattcgatcagcgcatccagttcacccactgcgtcgcgccactgctgttttaccgtatcaatacgcgccacaatttgcgcgtgacgggaagccagcgtttcatcatcgggcggcggtgctttgataaccggcgcttcaccttgcagataacgattaatatcgcgcagcaacgcctgcggccctttccaggtttcaaagacgacctgggctatttcacgcggcagcgggtagcagtggcgacgccagaaatcggcgcaggcctggtaacgtagcagagactcatcttcaatcagctgctgctcaaacagcatgccggattcaaaggcattcaggttgagcatgcgctggcaaaaaccgtgaatagtaaagactgccgcttcatccatctgccgttcggctaacaacaaccacttcgcggcttgcgctttatcgtcgatctcttccagcagacgttcgtacagtggattgtcggtggtttcacgcagacaggcgatgcgcaactcatggatattgctacggatacgaccacgcaattctgccgtggcagcctcggtaaaggtgaccaccagcagttcttcaacggtcagcgggcggggaaaggcggcggaaccgcctagtccaagtaacaggcgcaaatagagcgccgcaatcgtaaaggttttgcctgtgccggcagangcttcaatcaggcgctcgccctgaaagggcaagcgcaaaggatctagtgtctcggcgacatcactcattcttttcactcatcaggggcattgtttgctgcaacgcgctgacgttctcccacactttccagccttcaggatgcacatattcggctttcccgttctggctgccggaaatctgcgacagaatagccatgccttgcggctcgaccaccgcctgatggaagaaatcagcaagtttttgcggcgtcagcagttttatctgggccacgattttatcacgcgaatcgaagcgcatattgccgcgatcgaaatctttacttaacttcgatgcttcttcgccgagcgtttgcggtgcctgcagcatctgggtaattaccgcctgctggatttgcgcaaactcatctggcttcatcgctcgcaattttgcctctgcggttgggaaaaacgccttgtaacgctcccacaagaatgaaggctgtttatcattgctttgcaaaaggaagcccatgccccactgacgccccacgctcattggaaacgcaaacacggcatagcccaattgttcttcggtacgcaactgattgtagaaccacggctgtacgatctgccccaacagagagctataggctgagcttgtgtattcatcgtagccagtcggtacaaataccgctgccagtgcggagtcggtgctgttaccggctttttcaaagatgacggattgttttttatcgaccactacatctttgtttcgacaccactctgaaccatcagcgcccaactgtttttgcacatcgcgtgccagcgttgttgcctgggcctcggtcatgttgccgataaccataaactctggtcgagcccctgattttaaggcgtcacgataagccagcacctctttcaacgtaatggagggcaaaattttacgccgttcatctcgcgagaagtacggcacttgcgagagcatctgcgcgggcataatcgcctgctcaaacgctttacccttttctgcggaatccatcatctggttataccaggacttcgcctgctcaagctgatcttccgtagcggtatagctaaagtatccctcgagcaatgcctggaacagctgcggcagacgctgggtgtaaccattagcattaaccataaggccgttgttagcgttggtggaaaaacttatgccaccaaccgacgcctggttgcttaactgatcaagcgccagccctgcgagataatcattgagcgcaaacatcacctgattgcgggcgctgtccatggctttcggattacgcaaaatcaggctgacatcagctttgggttcgctggaaaaataacggcttggcgcatacaccacgcgcagattcgactcatcaacaatcagctctggatggtcatatttcttctctgacttaatcagcgagaaatcgtcaggaatataggggttaagctccggtaaggagagcgcaatattggcagctttttgctgccagtcagcgaaagtttgttcgctgattttatcgacctgatacggcgcatcgataaaataagccgttttattgtgcggctctttcgggctgatataccagatacgcgcattctgcggcgtcatcatcgccagacgttcttttactgctttagcatcgtaccgatcggcaatattgactgcatccagcgtatgctcaacaggaacgcgaatcatggtatctgccagccattcgacgtaatccatatcacgggtgattgacggataacggaagtcgatatccagcacattcgccagttcatcgaagtattgtttatcgatccctttttcacgtaacaaattgaggtagctaaaaatagccgccacaacctgatcgcgattcgccagacctttatcggttaaagacgcagagatcgctaatacgccgctgttgccgttgacgataggatcggagttggcgctaatgccctcaactaacccctgcttttgcagccagtcagacagtgtacctgggctgcgattaccaatcagataggtaatcaattcatccgttttactgcggaacttcgctgagttgttatcgatgcgaaactcaacgcgcagaactttacgcggcagcgctgggacgtaatgaatgataatgcccttttgcgcgtcggtgactaccggcacggtgatttccggttttttgctctctttgttcggcacgcgaccaaaagtgtccgccgccatttttgccaactccggcagcggtttattactgtaaataaccgccttcatcaaattggcggaatagtacttctcgtggaaatctttcagcgcctgctgcaccggattaccaggtttgtcgcttaaagtttcgaggttaccaccagaaaactttgaaccggggtgtgccgggttaatggtttctgcgctgacctgtgccatgcgcatcccgtcacgcgtacgcgccatggttaattcagcgttcactgcattacgctcacgttcggcgtatttcttgtcgagcaagggttctgcaatagcatcggccaggcggtctaccgcaccgggcaaggcgtcgttctcaacttccagatagaaagccgtgcgatacggcgcantgctggcattgtgactaccgccgtgcattttgagatattcggccagactgtcagcctgcgggtactttttcgaccccatcagactcatatgttcaaggtaatgtgccagcccctggtacgcctcgggatcttccagcgacccaacgggcaccaccagcgccgatagcgatttaactgcctgcggatcagaaaccagcaagaccaccataccgttatccagacgtatagcctgatactggcggttatctttatcacttttacggatggtttcctgaatcggctgccatcccgtttctgcctgacttaagggtgcccaaagggcaactaacaacaataatgctttgaaccaggtgctgcggggcattcacggacctcataatcaactttattttctggccagattcaacaggttaacgcaaatcatctgccagaatttaatcttgtgctgcacgagtcagcctatgtttatataaccatcagtccgtgactggtgcgcatcataaagtaagcggatagattgcgcaatttttatacagcgctcatgactgattaaagcgaaacagcggtaacaggaaacgttgcgactgttcaacgattgcctccattgtctctggtgttaattgccgccagagcctttgataccagatatcatcaccttcgccacgcaccatcatgttgccttcgtaagcctgaaggaatttcgtacgggctttttgcaacgtggaatcgtcatccagcatggcatcgttttgcgcgtcataacaggtttttagccacgcgccgccactttcaggtaacaccagcaatggcgcggacatcccttcacgatacccctcaatcagttgtgagaggtaatgcaaagcctgttcggctgcaagcggcggaaaacgccactcgccgtctttgcgtagaaaaaggcgactttcaccattaccaccgctggcacagtagacaaggtgttccagccaaagttgcattccctgcgccacacttaataaagagggacgccagcgcaacaagccatccggctgcacctgcggcaaccagccagttatctgcacaccgttgcaagcgagatcaatttccatactctgccccggctggcgacaggcaatgactctgtcggcaagctgctgcatctcctggcactgtgtttcccagaaaatttcaccaaaagcgccatacggtaaatcccctgccgcccggaagcggcggaacaagcgttcggcatcatcctgctcaaccagtgcattcaataactgctgattgatttgataacggctaagtccttccagaataaatggctcggtgtcggggatttcgctgtcttcagtacggaagttcacctgcaaacgcatctggaagaacgcccgcaccggatgtgcccagaatcgttgtagcgtttccagcggcacggtttccggtaaggtaaacggcagcggctgaacaaattcagaatgtgctttaccagcctggctggccgcaggtagccattcacgagcatagctttgtcgttcgcctggctggtagttttgcggatcaaacggcatccgggtatggaggcaagtaagatgcgcttttacccttgcctcgctttcatcacagttgagcgcttcatcgcccggtagataatgactttgcccgatgtagtcgatcagttcctgcaccagtaccgacgggaaacgttcactgttatcctgaatggaacgcccgatatagctgatatagagtttttgctgcgcggaaattaacgcttccaggaacaggtagcggtcgtcatcgcgacggctacggtcgccacgcttcggtttctggctcatcaggtcaaagcccaatggcgcaagctgacgtggataaacgccgtcgttcattcccagcaggcaaaccactttgaacggaattgaacgcattggcatcagagtacaaatgttaaccggcccggcgagaaaacgctggctgatacgttcttgatccaggcgctgtgccagttcatcacgcaatagtgacagcggcaccgcatcgccatactgcgcacctaaaccttcggcgataatcgcctgccattgttgttcgatcagcgtcatcgccgcttcggtttccgcatccggcaggaagagggcgttgagcatatcgcgacaaaccggcaaccactcttccagcggacgctcctgtgccagcccgcgacgccagatgtttagctgcattagcagtgaagccagatgccccaccagttctgcaattaagccgctcgattcatcataaggtagaaccgattgccactcgccctgcgcgctctccatcgcgtagcccaacaacatacgcgtcaggccaaatcgccaggtgtgttgtccggtggcggggagttccagctcgcgaacgttgtcgtcatctatcccccaacgaatgccggattcgttgacccactgacgtaaataacgcagcccttcttcggtgatgtcaaaccgcgccgccagcaccggcacatccagtaatgccagcacgtcttccgacacaaagcggctgtctggcaacgataacaggctgataaacgcttcaagtacaggatgcgactgccgcgcccgacggtcggaaatggcgtaaggcaggtaacgatccgcaggtgcgctaccaaacacagcctgaataaacggactgtagctgtcgatatcagccaccatcacgatgatgtcgcgcggagtaagtgtcgggtcttcttccagcatcgccagcaggcgatcgtgtaaaacttcaacttcacgctgcgggctatggcaaacgtggaaggtgatactgctatccagtggatcaagcggacgtttgttatcgctacgggaaaactcttcgatgttcacaccagcaacggcgcggttttccagttccagaatgtcagactgaatgttatgcagcaggttatctggcgtcacatcgacaaaggcgtccagctcctggctgctctccaggtcagaaaggagataaatgtagtcgcgcccaagcttgccccatgaggccagcagcgggttgccgacatcctgttcaccatcgctgttaaagagctgcccggcattttcgctgtcgcgnnnnagcggtaattcgcgatcttcaaaactgtgtcggcgctggcgagtcagtagtttcgccagataagcaggatctttaatgtcgccccagtaataacggcaggggttggtaaacaggagatggatttcaatatgtttacccagcgcctggagcgcctggagataaacaggcggtaacgcggaaataccgcatataaagacgcgcgaaggtaaccccggcgggcaggtcgtcgcggactccagcgtttcgataaagcgctgatagagattggcgcggtgccagcgcggttgtccgagttcatgggtatattccaccagcgccttccacaacggcgcttgccaggcctgtgcctctcccagcccttcaaccaaatgtcctgtttcccactgtgccagccagtccggacgatagaccagatactggtcaaacaggtccgccgcttttgaggaaagctggaacagctttcgcttgtcgctatcgtcagtcagataatgccgcaacagggtaaagtcttcgcgctccagcaattgcggcagcagagtcatcagtttccagctcatgctctgtttgttaaaggcgctctctttggggatctccggtaacacccggacgaacatatcccagataaagctcgcaggcagcggaaaatcaatgtttgccgcaataccaaacttttgcgacagggtcatttgcagccactgtgccataccggtactttgcaccagaatcatctctggttcgaaaggatcgtccagccgttcgcgttcgacaataaactccatcaacgcttccagcacgtccagacgattggaatggtagacccttaacatagcggctcctgactactgacgattcgggcaatgcaggcgggtcatctcgcctgctctgcccccgggtgaaactagcgtaacgctgatgctgacacatcccgcctgcgatgtctgcattcggttgacctgccagttggcaggtggcgaaatcgcgcgcnnnngcgtttgctgccaaccatgccgccagagctgttggtactggtttctgctggtaagactgttcattaatgttcgctggaaacccgataacgcagtgacaatcatcaccatcaacaccatcgccaacattacctccggcaggctaaagccttgttgattcttcagggaagctgacataacgccccctctttcagcggacaaaaatcgctccagccgcgtggcgaaaaaacaatttttccatcaatgacttcgcctgttcgccacaacgaaacgccttcataaccggcaattaataaggcttcattatcttccagtaaacgcaaacaaacccgggcaccagtggcagcgtacagtaagcactgaactgcgggctgcgtctgccaggagtgcattttcccccacgccaacgccgactgaacgatggcctggcggcgcagtgactgactttccatgctcacgcgagaggcaaaactgcgatcctgctggctcattccttgtaatagcaagctacccaaaaccagcagcatcaggaccagagccagtgacgaaacacccttttcgcggttcacaggttgaatcctgtcacgctatagctggcatccaccacggtttgcggttcagacttactggcagcacgcatattaaccgtcaacaccggcgagaagccgctgacatcctgacgtacgacctgaaaagtgtcgataatgatggcatccggattagtgactttatcccagcccttaccttcacaggatgtcgcaccgcgtagcgtttccaacacttgctccttcagacgaaatccaatctggtcggactcttttaccggttcgcgatcccagataccgttactgttcgcatcccactgcacaatgatacagtcaccctgtccgacaatttccagcccttcgccggtacagatgccatgacaataacccgccctctggagatgcttcgcgacggtaaatacccgcagccagatttcatcttccagtgccagcttacgggtgctcgttaaactttcacgctgtaacgcaggcagaaagcgtgcagcccccaacaacaatacgctactgatcgccatagcaatcaacacttccagcagagaaaaaccttgctcttttacaggcatccttctgtttctccttgctgacaaagccggagtcttccccacggcgaaaccaccagccaccactcgcccgttgagtttttgaagccaatatgcccggcccatgcggtattgcgcaggccaaagaaagcaagcgaaggtgtcaggtcgctcatttcgacttcgggccagcgtggcacaaagaccaatggtgaactgccatgacaggtattcgccccagcaacggaactcacaaggcaccataacgtcccctccctgataaaactgatactgtggtcgcggttatgccagttggcatcttcacgtaaatagagcaaatagtcccgcgcctggctggcggtttgccaaagccgttgcgactgctgccagtattgccagccatagagtccacttgcgcttagcatgaccaaaatcagcatcgcgaccagcgtttcaatcagcgtataaccacgttgtgttttcatgccggcagtatggagcgaggagaaaaaaagacgagggccagtttctatttcttcggcgcatcttccggactatttacgccgttgcaggacgttgcaaaatttcgggaaggcgtctcgaagaatttaacggagggtaaaaaaaccgacgcacactggcgtcggctctggcaggatgtttngtaattagatagccaccggcgctttaatgcccggatgtggatcgtagccttcaatctcaaagtcttcgaaacggtagtcgaagatggattcgggtttacgtttgataatcaacttcggcagcggacgcggttcacggcttaattgcagatgagtttgatccatatgattactgtacaggtgcgtatcgccaccggtccagacaaaatcacccacttccagatcgcactgctgcgccatcatatgcaccagtaacgcgtagctggcaatgttgaacggcaggccgaggaagacgtcacaggagcgctgataaagctggcaagagagtttgccgtctgccacatagaactggaagaatgcatggcacggtgccagcgccattttatccagttcgcctacgttccacgctgaaacaataatgcggcgggaatccgggtcgtttttcagctggttcagtaccgtagtgatctggtcaatatgacgaccatctggcgttggccaggcgcgccactgtttaccatacactggtccgaggtcgccgttttcatcggcccattcgtcccagatggtgacattgttttcgtgtagataagcaatgttagtgtcgccctgcagaaaccacagcagttcatggatgatggaacgcaggtggcaacgtttagttgtcaccagcgggaatccatcctgcaggttaaaacgcatctgatgaccaaaaatggaaagcgttccggttccggtacggtcgtttttctgtgtgccttcgtcgagcactttttgcatcagttctaaatactgtttcatggttcctcaggaaacgtgttgctgtgggctgcgacgatatgcccagaccatcatgatcacacccgcgacaatcatcgggatggaaagaatttgccccatgctgatgtactgcacccaggcaccggtaaactgcgcgtcgggctggcggaaaaactcaacaatgatgcgaaacgcgccgtagccaatcaggaacaagccagacacggctcccatcgggcgcggtttacgaatatacaggttgaggataataaacagcaccacaccttccagcagcagctcgtaaagctgtgatgggtggcgcggcagcacaccgtaagtgtcgaaaatggattgccactgcgggttggtttgcagcagcaaaatatcttctgtacgggagcctgggaacagcatggcaaacgggaagttcgggtcaacgcggccccacaattcaccgttaataaagttgcccaaacgcccggcaccaagaccaaacggaatgagtggtgcgataaaatcagaaacctggaagaaggaacgtttagtacggcgggcaaagataatcatcaccacgataacgccaatcaggccgccgtggaaagacatgccgccgtcccagacacggaacagatacagcggatcggccataaactgcgggaaattgtagaacagaacataaccaatacgtcccccgaggaagacgccgaggaagcccgcatagagtaagttttcaacttcatttttggtccagccgctgcccggacgattcgcccgtcgtgttgccagccacattgcaaaaatgaaacccaccagatacatcaggccgtaccagtgaagcgccacgggtcctattgagaaaatgaccggatcaaactccggaaaatgcagatagctactggtcatctgtcaccacaagttcttgttatttcgctgaaagagaacagcgattgaaatgcgcgccgcaggtttcaggcgctccaaaggtgcgaataatagcacaaggggacctggctggttgccggataccgttaaaagatatgtatatgatccgcgctataaccctccgcgaatcagcccgcccatgccgcgacgctccataaaggctgcaacctgatggcgaacttcggtcgccagttgcgcttccagactacgctgcgcaagattttctgcttcggcataatcaatgcgccgcagcaggtattttacccgcgctacagaacgtccgttcatagacagatggcgatacccaagcccaatgaggattgccacgcacatgggatcgcccgccatttcaccgcacaaacggagatcgattccatgtatttccgcttcccgggcgatcatcgccagagctcgtaacattgcaggatgaagactgtcataaatgttcgccacccgggtattgttgcgatcaacggccagaatgtattgagtcagatcgttggtgccaacagagatgaaatcgacccgctttgccagatgcggcagcataaataccattgacggcacttccagcatgatgccgatacgtggtttgggaatttcgtaaccgatcatctcctcgacttcacgtccggcacgttcaatcaggcggcgtgcttcgtcaacttcatcgaggcttgtgaccatcggcaacagaatattcaggttgcccgtagcggcattagcacgcagcatcgcccgcacctggatcaagaagatctccggctgatcgagcgtaatgcgaatcccacgccaacccaggcatggattctcttcgctaatcggcatgtaaggcagctgcttatctgctccgacatccagcgtacgcaaggtgacgggtttatcattgaacatttgcagcatcccctgatactgcgccacctgttcttcttccgacggaaaaccactttgcagcatgaatgggatttcagtgcgataaagaccgatgccatcaatacggctgcccagtttttcttcatgttccgggcttaaaccagcattgagcatgacttttatacgctcaccgctttttaactgcgcgggtaaattgacgtcatcttccgccagacggctaagctcaatctcttcactaattagccgctgatattcttgcagcagtaccggctccggatcgaccagcaattcaccgcgatagccatcgacgatcagcgtccgacgatgcagcaccgaaggctgaatatccgcgcccatcacggtagggatccccagcgcacgtaccatgatcgcagcatgggagttggctgcgccatctcgcacgacaacaccgactaagcgatcctggggcagctcagcaagagttgtcgctgacagttcatctgccaccagaatgaaacgttccggccaggcgttcggcccttgattagcgtcatcaagatgaaacagcaatcgctgacccagcgcacgtaaatcgccagcccgctctttgagatagttatcgcttagcgcggcaaactgttcggcaaatttttcaatgaccgtttttaccgcccattctgccaccgagcctttatcaacctcggcaaacaattcacgacgcagccgggtgtccgaaagcaggtgcgagtaaagatcgaaaatagccgccgtttctttttgtgcaccggcggcaaagcgtttgctgtagcggcgaaactcgtttgccgcttcttccagcgccccggtcagtcgttcgcgttccagagccggatccagcgttgatgcctgatacacctgttccattaaaggtaacgtggcatcctgccagccttcggcaatcgccacaccaggtgctgccggtaatgcgcggattcgcgtctggcgatattgcccaaacaaggcagtcaactgcgactgagaaagaatcgctgccatctgggtggcaagcgtcaccaggaaggattcttcactttcgtcatactggcgcaactctcgttgctgtaccaccagtacaccaagcaactggcgacgttgaataattggtacgcctaaaaacgcgcggaaacgttcttcttttacggaggggatgtatttgaagctggggtgcttttgcgcatctgcaaggtttatcggttccgccagcctgccaaccaggccgacgatcccttcatcaaaggcgagcgttacagtgcgaccgcgtggttttttcagcccccgggtcgccatcaggtagtaacaacgtcgatcatgatcggccaggtagaccgaacagacctcggtatccatcgcaagacagatgtcggtaaccagaatatttaacgcctcattcaggcgtggtgcgctggctaccttttcgactatttcgcgcaggcgagtgagcataattggcgtgacttaacctcttttacgtcgataagcagatgcgttttgtggttttggcgtattttcctgcagtgacatcaccacactcgcgaactctttcattaccctacggtagacatcacgtttaaatgacaccacctgtctgaccggataccagtaacttacccatcgccagccgtcaaactctggtgtactgctggtttgcatattgatttctgcatcgccgctcaccagctgcaagagaaaccatttttgtttttggccgatacaaaccggcttcgtgtcccaacgcaccaaacgtttcggtaatttgtagcgcaaccagttacgcgttgaagcaaggattcgaacgtctttgcggcttaatcctacttcttcaaacaattcacggtacatcgcctgctctgcggattctccggggttgattccgccttgcggaaattgccaggagtgctgaccaaatcgccgggcccacattacctgcccctggcgattacaaatcacgatacctacgtttgggcggtagccatcgtcatcaatcaccggactacctcaaaatanagctttatatacgaatgattgtttcatactccaggaagacggtaaaccactctctgcagggcattacacactaacaacaattgaataactcacagttatgtgcagagttataaacagaggaaggggtggatagccgtttttattcaccttttctgtggatagagttgtgaagaactacggaattactacgggaaaacccggagcattctgaataagcccgatatagacattttaaaatattcattattagtcaatgcattacatgtaatttaagtaatgaaaaagagtaattcgtgacccaggtcacacctctcatttacgggttggcgaaagatcaaccaatgccgtatttatccacagaatgtgccactaagttaagcactgaaccactaaaaactggagtttcgtcgcacgtcaaggctgtaaatggaaacagtagtggaggtttttcacagttatcccagctttctgtggataacatggtgtaagatcctgtttattttcagtgaccagatttggaaaacccgttgcagtgttgcgcaactcgattaccggcaacctaaaaagcaatataaatcagataattgaacaacgcatgtggaaaaagttacactgcgaatattcggcacataattgctgtttgttttttaaccaaggtatcatgacatgtcccaacctcgcccactgctctctcctcccgaaactgaagaacagttgttagcgcaagcacagcaactttctggttatacattgggagaactggcggcacttgccgggctggttacgccagagaatttaaaacgcgataagggctggattggcgtgttactggagatctggctaggtgccagcgcagggagtaaacctgaacaagattttgctgctctgggcgtggaacttaaaactatccctgtggatagtcttggtcgtccgctggaaacaacattcgtttgtgttgccccgttaacgggcaatagcggagtgacctgggaaaccagccacgtgcgccacaaactcaaacgcgtactgtggataccggttgaaggcgagcgcagcatcccgctggcgcagcgtcgcgttggatcaccgttgctgtggagcccgaatgaagaggaagaccggcagctacgcgaagactgggaagaattaatggatatgattgttctcggtcaggttgagcggattaccgctcgtcacggggagtatttacagatacgaccgaaagcagcgaatgcgaaagcgcttaccgaagccattggtgcacggggcgaacggattcagacgctgccgcgcggcttttatttgaagaagaatttcaccagtgcactactggcccgtcattttctgatccagtagccatcgctttgacctgccgctttccgggcatataattaccgcttcatttttttggcagggctttttagatgttatttgcatggataaccgatcctaacgcctggcttgcgctcggtacgctgacgctgctgnagatcgttcttgggatcgacaatattattttcctttctctggtggtggcaaagctccccacagcacaacgtgctcatgcgcgccgtctggggttggcgggagccatggttatgcgtctggcgctgctggcatcaatcgcctgggttacgcgcctgacgaatccgctttttacaatattcagtcaggaaatttctgcccgtgacttgattctgcttctgggtggcttgttccttatctggaaagccagcaaggaaatccacnaatccattgaaggtgaagaagaagggctgaaaacacgcgtttcatcattcctcggcgctatcgtgcagattatgctgctggatattatcttcagcctcgactcggtgattaccgctgtgggtctgtcagatcacctgtttattatgatggccgccgtggtgattgccgtaggcgtgatgatgttcgccgcgcgctcgattggtgattttgtcgagcgccatccttcggtaaaaatgctggcgctctctttcctgattctggtgggctttaccctgattctggaaagtttcgacatccacgtaccgaaaggttacatctacttcgcgatgttcttctctattgcggttgaaagcctcaacctgattcgcaacaaaaagaacccgctctgatactccgtacgctctcctgcgggagggcgtactcacttctgttaccctcacagtttaagattttcctgctttcaagatatataacgtcagtttataaacagactattatcataggtgggccaaatgaggataaccggatgaaaaaatgggcagtaataatttctgcagtcggactggcgtttgctgtttccgggtgttccagtgattacgtcatggcgaccaaagatggccgtatgattttgaccgatggaaaacctgaaattgatgatgataccgggctggtgagttatcacgatcagcaaggtaacgcgatgcaaattaaccgtgatgatgtttcgcaaataattgaacgttaacaaataaggtcagcatccggctggccttaanatttttctctttcccttttcccttccctctgccatttttatattccttatgtcgtgattataaaaaggaaacggctatgcaatatcaccgtataccccacagttcgctggaagtcagcacgctggggcttggcacgatgacgtttggtgaacagaacagcgaagccgacgcccacgcacaactcgactatgccgtcgctcagggcattaaccttatcgacgttgccgaaatgtacccagtacctccgcgccccgaaacgcaagggttaaccgaaacctacgtcggcaactggctggcgaaacatggcagccgcgaaaagttaattatcgcctccaaagtgagcggaccgtcgcgcaataatgacaagggcatccgcccggatcaggcgctggatcggaagaatatccgcgaagcgctgcatgacagcctcaagcgtctgcagactgattacctcgatctttatcaggtgcactggccgcagcgcccaaccaactgcttcggcaaactcggttatagctggacagattctgcgcctgcggtttcgctgctggatacgctggacgcactggcagagtaccaacgagcgggaaaaattcgttatatcggcgtgtcgaacgaaactgcatttggcgtaatgcgctacctgcatctggcggacaaacacgatctgccgcgtattgtcaccattcagaacccttacagtctgttaaaccgcagttttgaagtaggtctggcagaagtcagccagtatgaaggggtcgaactgctggcctattcgtgcctgggtttcggcacgctgaccgggaaatatctcaatggtgcaaaacccgctggcgcacgtaatacgctctttagtcggttcaccc

SEQ ID NO: 1470 - DNA, 13626 bp, Escherichia coli
  Strain O55:H7
  modified_base (815)..(815): a, c, g or t
  modified_base (1968)..(1968): a, c, g or t
  modified_base (2523)..(2523): a, c, g or t
  modified_base (5799)..(5799): a, c, g or t
  modified_base (7111)..(7111): a, c, g or t
  modified_base (7736)..(7736): a, c, g or t
  modified_base (10571)..(10571): a, c, g or t
  modified_base (10623)..(10623): a, c, g or t
  modified_base (11846)..(11849): a, c, g or t
  modified_base (11851)..(11852): a, c, g or t
  modified_base (11866)..(11866): a, c, g or t
agcggtgagcaaacgcaaaaagccgtcgcggcgtatgttgatatcgccagacgtcatggcctggaccctgctcagatggcgctcgcgtttgtacgccgtcaaccgtttgttgccagcactctgctgggcgcaaccacgatggatcagctgaaaactaacatcgaaagtttgcatctggagttaagcgaagacgtattagctgaaattgaagcggtgcatcaggtttatacttatccggcaccataagattaacgccggttaaaaccggcgttaaatattaatgacggcgctgccagatccacagcgccgttattgccagcgcaaatagcgcaccgaagccaatgccaatgggcacgaccgggatgcctaccattaccgccagcgagtaaatgcccagcatcaacaacatggcgctgttttcgccaaggttttgtactgcaatcgcattccccgccccgacgctttttttaccccgctcctgtagcaacgcattgagcggaacgacaaaaaagccccccaacacgccaatcagcatcaacaaggcataggctggcagctgctcgtgttgcagggagaaaatcagtaccaccacgccaatcaaaattccggctggcatacagcgtgacacggtttccagcgtaaccagcttcgctgccgcacctgcgccaaccacgataccaatcgctaccatcgcgttgagataggtcggcgtagcgttatcggtaatgcccagcgccaccggtacccacagcaccaacaggaaacgcagcgtgacacccgctccccagaataaactggtgcccaccagcgaaaancgcgtttcaccattgcgccatagcgaggtgcaggcattcaggaaactgcgggtcatgttgatgagattccaggactgccccggacgcgccgccgccagtttgggaatgtagatattggcaacgaccgcaccaccgtaggccagtgcgcatgcggccagggcgaccaggacatgccagtcagccagcacaccaccggctacggaaccgagcaaaatcgccgctatggtagaagcttccattaaaccgttagcttttactaacttactacccgtggttaattcgccgagaataccgtatttcgccggtgaataggctgcagcaccaacacccaccagcgtatagccgagaaacggattgataccaaagcagatactggctgcgcccagcagcttcaggccgttggcaaacatcatcacccggcctttggcgaagctatccgccacctgcccgacaaacggcgcaaaaagaatgtaagcacctacaaacaccatttgcaggatgggctggctccactccggatagaactgcgctttcagtaacgccagagtggcaaacagtagggcattatcgccaaacgcagagagaaactgcgccacgataaccgctttcatccccttcgaccacaacgaagtgttagtgtgcactgactcactcatcgtgttgttccacttcgtctacccagcttttcaacgtgacaaagtcaggtttgccgctgccaagtaatggcatctgtttcaaatagcgaatatcacgcggtacagcaagctccggcacgccgtgctcacgggcatactgttgcaacttatcgcgcgtcagttcgttatctgtggtgaaaagcaccagtgcctcgcctttgctggcatcgctcttaatcgcagtggcatggactttatctggcgaaacaccaagtgccagttgttccaccatttccagcgacaccatttcgcctgcaattttggcaaagcgttttgcgcggccctgaatctgcacaaagccctgctcgtcaaaacgcacaatatcgccagtgtcataccagccgcgctccatttcgccgcgaacattctcggcggtgggcacttccagtacacctggcttctccacccgcagatagccgttcattatgttcggccctttcagttgcaggcgtccgccntcttcgataccagggaccgacaacaggcgcgcatccattcctggtagaatacgccctaccgtaccgggtttcgccgccatcggtacgttgatagaaacgacaggcgcgcattcggtcacaccgtagccttcaaggatgcgcaggccaaatttatcctgccaaagctgtttggtactttcttgtagtttttctgcgcctgccaccacatagcgtagacgatagaagtcatacgggttggcgaaacgcgcgtagtgaccgaggaaagtcgaagtgccgaacaacacggtgcaactgcggtcatacaccaactccggcacaatacggtaatgcagcgggcttggataaagaaacacttctgcacctgtgagcagtggcgtaaacaggcctaccgtcagcccaaaggagtgaaacagcggtaacgccgacataaagcgatcgttggtggtgaagtcggcaatcgttttaatctgctcgacattcgccagaatgcttttatggctatggacgacgccttttggatggccttcagaaccggaggtaaaaaggatcagcgcntcttcttccggctgctgtttaacctgtgccagacgcggcatcagcaaatgagcgaagatccatactttgtcggcagtggtgacatctgcttttaaatcttccagatagacccagcgcacctgagtaagttgctccggcagatgccagagtttgcctttatcgagaaactggcgggaagtgaagatggttttgatttcagccgccgtaatagcactggtcagcccttttaccccagcagtgtagttcatcattgcgggaatgcggcgacgggcgatgcccccaaaaatcactgccgcactgatgcctgcattgggcagcattaagccgatgcgttcgccttcaacactgtatttttcaaggatgcgtccaacaaacagcgttttcgtaagcaatttgcgataggagtctggggtaaaattgacgtcttcgacacatttcttccctgctccgaagcggtacattgcactcagtaaagattcgtacagcgtttcacgcgggcgcaccgccattcgcgcttccatcattatttgatgcagcatttcgccagcgattttgcgacggtcacgggcacgcggcgcatccggcatctccacctgcgttggtggcaaaatatgcagagtaatttgcgggaacaagcgacgtttaaccagacctttcaggcggctgaagtgcgtaagttccgccccttcaatacgcacaggaataaccgttgcaccagacttcgccgcgacaaaacccgcgccatcgtagattttcatcagcgagcctgtggtggtgatgcgtccttcagggaaaatcaccactggtcggccctgttccaccagacgtaccagatgtttaatcgccataggttgcgtcgggtcgagaggaacaaagtcgataaatgatttcagccaacgcatataccactgttggcttattgaggtgtaaacggcaaacactggacgcacaggtaaaaacagtccaagcaaaatgccatcaataaaagagacgtgattaggcgtaattagaacgcgctcgcccttcagtgcctgggggtcacccgtaacgcgaacgcgatacaaaacacggcacaaatttcgaaaaaagctaaaaagcattccaactccctttgctctgattcagtaaaagcgaatggagggagattacacgagataaagaacgcgagcgacagtaaattaggtgcgaaaaaaaacctgcgcatccgcgcaggttggtgcaagagacagggtacgaagagcgtaccgaataatctcaccaatcaatacctctgggatcttgattgtggtctgcacgacgactcttcgccagcgagaaaacgcaaaggaatgaagggaaatgcaacgaggtgtgtaaattgtcggttactgttacagattgatgaccggcaaaaaaaaacctgcgcatctgcgcaggctggtgtaattcatgtgctcaacccgaagttgacttcacctatcaatacctctgggatcaccactttagcaacctgaagccaaacgccaccagcggtcaatcgcaacagcgtttcgcaaagtgtaaccaaaggtttgcaatctctttttttgtcttacttatttgcgtttggctcacattcccacgatgaaaacacgccgccccttgaaccaacgggcgttttccgtaacactgaaacaatgtaagcgtttacccactaaggtattttcatggcgaccataaaggatgtagcccgactggcaggcgtttcagtcgccaccgtttcccgcgtcattaataattcacccaaagccagcgaagcttcccggctggctgtgcatagtgcaatggagtctcttagctatcacccgaacgccaacgcccgtgcgctggcgcagcagaccactgaaacggtcggtctggtcgttggtgatgtttccgatccgtttttcggtgcaatggtgaaagcggtcgaacaggtggcttatcacaccggtaatttcttattgattggcaatggttaccacaacgaacaaaaagagcgtcaggccattgagcaactgatccgccatcgctgtgctgcgttggtcgtccatgccaaaatgatcccggatgccgatttagcctcattattgaaacaaatgcccggtatggtgctgatcaaccgtatcctgcctggctttgaaaaccgttgtattgctctggacgatcgttacggtgcctggctggctacgcgtcatttaattcagcaaggtcatacccgcattggttatctgtgctctaaccactctatttctgacgccgaagatcgtctgcaagggtattacgatgcccttgctgaaagtggtattgcggccaatgaccggctggtgacatttggcgaaccagacgaaagcggcggcgaacaggcaatgaccgagcttttgggacgaggaagaaatttcactgcggtagcctgttataacgattcaatggcggcgggtgcgatgggcgttctcaatgataatggtattgatgtaccgggtgagatttcgttaattggctttgatgatgtgctggtgtcacgctatgtgcgtccgcgcctgaccaccgtgcgttacccaatcgtgacgatggcgacccaggctgccgaactggctttggcgctggcggataatcgccctctcccggaaatcactaatgtctttagtccgacgctggtacgtcgtcattcagtgtcaactccgtcgctggaggcaagtcatcatgcaaccagcgactaaccgcagttaaagcaattccagcgccagtaattcttcgatggtctggcgacggcgaatcaaccgcgcctgaccattatcaaacagaacttctggtaacagcggacggctattgtagttggatgacattgatgcgccatatgcccctgtatcatgcagtaccagataatcacctgccttcacttccggcaaggcgcgggtttcaacatttcccccttcctgctgggtaaagacatcgcccgattcacataacggtccggcgacgacggtttccaccgttggtgcgtgttccagagaacgaccatcagctgccagggcactgatatggtggtaactaccgtacattgccgggcgcatcagatcgttaaacccggcatcaaccagcacaaagtggcggctacccatttgtttgacgctccgcacctgagtaattaacacgccagactgcgctaccaggaagcgacccggttcaatttccagtttcacagggtggcccaaatggcgggcgatttgctcacgcgcggcattccacagaccataataatgttcggtatcaaccgcntcttcaccctgttgataaggaatagaaagcccaccgcccgcagaaatagcctgtaaatcctgaccgaattcgatgacctgacgcaccatagcaccacacacctgttccagatgggcataatcaacgccagaaccaatgtgcatgtgaatgccgaccagctgcagatgatgacgttgtatcacgtccagtgcggcgggcagatcggtgcaccagataccgtgcttgctgttttcgccaccggtattggttttttggctatgtccgtgaccaaaccccggattaacgcgcagccatacccgatgccctggcgaaacctggcccagttggtcgagcatatcaacagaacccgcattcaccggaatttgcaattcactgacgcgttcaagcgtcgcctgatcgataacatctgccgtaaaaacaatatcatcggggtgcgtttgcggattgtaacccgccgccaacgcacgctctatttcgcctaacgagacggaatccactttcacgccctgctcacgcattaagcgcaaaatatgaatattggaacaggctttctgtgcaaagcgcaccacatcaaactgtttcagcgctgcaatctgccgacgaataatttgcgcatcgtagacccacaccgggcagccaaattcagcgggcaaacgcagcagattttcggcggtgagatcggtatcggtgctgaacagtgaatgtggcataacaaactccagatgagtgcttttttatgattacgccacatcataaaaagaataaaaaatatcgatttatgtcgagtctatgcaaaaatgatatggattaccggattgcgagagagcgctaatggccgccgttaacttacgtcatattgaaatttttcatgcggtaatgaccgccggaagcctgactgaggcagcacacctgctacacacctcacagccaaccgtcagccgcgaactggcgcgctttgagaaggtgatcgggctgaaattgtttgagcgcgtacgtggacgattacatcctaccgtgcaaggactgcgtctgtttgaagaagtgcaacgatcctggtacggactggatcgcattgtcagcgccgcagaaagtctgcgcgagtttcgccagggagaactgtctattgcctgcctgccggtcttttcgcaatcttttttaccgcagctcctgcaaccctttctggtacgttatcccgatgtcagcttaaatatcgtgccccaggaatcaccgctacttgaagagtggctctcggcccagcgtcatgatttaggactcactgagacactccatacgcctgcaggaacagaacgtnccgaattactctctttagatgaattgtgtgtgttacctccgggtcatccgctggcggtaaaaaaggtattaacgccggatgattttcagggtgagaactacatcagcctttcccgtactgacagctatcgccagttgctggatcagctatttactgaacatcaggttaaacgacgcatgatcgtagaaacccacagcgccgcgtcagtctgcgcaatggtacgggcgggggtaggtgtttcggtggttaacccgctcaccgcactggattatgcggcaagcggtttagtggtgcggcggttcagtattgcggttccgttcaccgtcagcctgatccgccccctgcaccgcccgtcatcagcgctggtgcaggcgtttagtgagcatttacaagcggggttaccgaaactggtcacttctcttgacgctattttgtcgtcagctacgacagcataaaagcgacagcatcctcggcatggatcgccgcagtatcaaacacaggcaaaacactgcgctcttctggcaccagtaaaccaatttctgtgcagccaaaaatgacgccctgtgcgccctgttctgcaaggcgagcaatcacttgcgcataataagcgcgtgacgcttcggtnaattgccccagacacagttcttcaaaaataatctgattaattttcgcccgttcatccgcttcaggaataagacaattgatggaaaattgttccgtcagccgcccgcgataaaaatcctgttccatggtgtaacgcgtacccagcagcgccacacgagtcattccggccccggtaattgcacgtccggtggcatccgcaatgtgtaagaaaggcagagtgcaacgtgactcaatggcatccgccactttatgcatcgtattggtacataacacaataccttctgcgcccgcccgctgtaagccaagcgccgcctcagccagaatgtccccggttttatcccattccccgcgacgctggcactcttctatttcatgaaaatcgacgctatgtagcagcacttgcgcagagtgaagcccaccaagccgctgtttaatgccttcatttatcagacgatagtaaggaatggtggattcccagctcattcctcccagcaaaccaattgttttcattcctctctcctgatgtgtgttaccgcaacaaggctgaataaggaacgagacaaacgcctcaacggccaggtgcccgatctctattaacgaaaaaagggccggatgtacagcacatccggcccgtgaaatcagacgccgatatttctcaacttctcgcctgccatcagtttgcgttcgatatgttccagcgtgacatttttggtttccggaatgagccagaaagtgatgcccacaaacgcaatgttcagcgcagtgtagagccagaacgtaccggcagcgccaatgctatcaagcagtgtcaggaaggtcgcgccgataatcatattcgacacccagtttgtcgtcgtcgaacaggtaataccgaaatcgcggcatttcagcggctgaatttcagagcacaggatccacaccactggcgcggcgctcatcgcataaccggcaatacacatcatcgtcatgccaacagagagccaggacaagccactggaagccgtaccgttatcaaactgcatcaggcaatagcccagcaccagagtgcctaacgccatcacgctgaaaccaattttcagagccggtttacgacctgctttatctaccgtaaagaccgcaatgaaggtcgcgaacataaaggtcagtcccacgaccagagtcgcaatcatctgttgttctgtggtcgtaaagcccgccattttgaagatacgcggcgcatagtacatgatgatgttcataccggtaaactgctgcatcgcctgcaacaacataccgagaaacacagcacgacggacgttacggttgatcttaaacagtgcccaaccgccttgttttaacttcaggctttcacgaatttcgttgagttcttctcgcgctttttccgacgtatcgcgcagcatacgcaacacttcttccgcctcaatatgacgccccttttccgccagccagcgcgggctatttggcaggaagaccaccagaataatcagcaggactgctggtaaagcaagaacccccaacattgcgcgccagttaccgctataactgaacgctgtatcggataaaaacgccagcacgatgccgagtgtgaccatcaactggtacatactgatcatcttaccgcgaacgttttcacttgccatttcagaaagatacagaggagcggtgtaagacgcgatcccgacagcaatgcccagcaccacacgagcggcgattaacatctctacgctggtcgcaaaagcggaccctatagaaccgagtacaaacaggatggcccccgccatcaggctgtatttacgccccaggcggaacgacagccaaccattaaacagcgcaccaattgctgcgccgagcatcatgctactaaccacccattcctgcaaacgactggtcagcacaaagtgatcggtaatgaacggcaacgctccggcgattacgccgatatcaagaccaaataacaatcctgcgaccgcagcagctaccgaaacaaacatattcatacgccgcgtatcacgcaaagaacgtggcgttaaagcagattccgtattgatagtaaccattttttcctgccagcagagagtaagacatagtgaaaaaatacgtgaacaattcacacaggtgtcaggtcggaaacagcataaatatggattaaattgctgcgacatgccgttatgtgatggatattccaattttaaaattaagttgaattattgagattattattaaccacctaattttaaagcagataaaattcataaagttcattaattgataattgatatggattatttcataaccatgatatggattatgatgatctagagatataaaaaaccctgccatgcggcagggtcataaaagtaagaggaatgaattaacgcgccagccaaccgccatccacagcaatggtataaccatttacataatctgaagcgctggaggcaagaaacactaccggccccatcaggtcactcggcagtccccaacggccagctggaatgcggtcgagaatttccgcgctacgttgttcatctgcccgcagttgttgggtattgttggtcgccatgtaacccggagctatcgcattaacattaatgttgtgtttagcccattcattcgccatcaatcgcgtcacgcccatcacgccgctttttgatgcggtataagaaggcacacggatcccgccctggaaggagagcattgacgcgatattgataatcttgccgccattgccttgcgcgatgaagtgtttcgccgctgcctgagacatgaagaatacgctcttgatattcaggttcatgacatcgtcccagtccttttcgctgaactcgagagcatnttcgcggcgaatcaatccggcgttattcaccaggatatcaatatgaccaaantcagctaccgcgcgatccagcagtccaggaataccatcaatctttcgcagatcggcggtcaggcttaaaaaacgacgccccagcgccgtgacctgcttgatggtttcagtcggttcaacgatgttaatgccaacaatgtcacagcccgcttgcgccagccccaacgccatcccctggcccagcccagtatcacaaccagtgacgaccgcaactttaccttcgagagaaaatgcacttaaaatcataacaataccttattcgtttatgcccacaactagcgcaaatctttaacggccacatggtccatatcatcaaagacctggttttcaccgaccatgccccagataaaggtataagctttggttccgacgccggaatgaatcgaccagctcggggagatcaccgcctgctcgttatgcatcacaatgtgacgcgtttcttgcggctgccccatcatgtggaaaacgcaggcgtcatcatccatattgaaatagaaataaacttccatccggcgctcgtgggtgtgacacggcatggtgttccacaagttacccggagccagctccgtcagccccatactcaattggcaggtttccagcacatccgggacaaaatatttgttaatcgtgcgacggttactggtgaggttatcgcctaacgtgactggagatacttcgtccggtgtgacttttttggtaggatacgtcgtatgcgcgggtgcgcaattgtaataaaacttcgccggagtgccggtatcaatactagcaaagacaacttcttttgcgcctttacccacatacagggcgtcgcggtgaccgatttcatagcattgaccatcgacagtaatcgtaccggcaccgccaatattgataacacctaactcgcgacgttcaaggaaataacttacgccgagttgtttacccacttccccgccaacggaaaccgttttagttaccggcataatgccgccaataataatacggtcaatgtggctgtaaaccatggtgtactcatcggcgacaaataccttttcaaccaaaaattcattgcgcagcccctgggtttccagcgtttttgcgtgcgcactgtggatgctctgtcttacgtccacatcaacctccgataatcagtgaagcgtgaaaatagaaaacgatagtgaaacactgtttcgttttctctataaggggatgatatgcccatgggatcgggttttcaattaaaannnnannaatgtttcattttngagttaaggattaaaaaaagtgcagtgtcgatcacgaatctgtcatgagaatggaaaaatcagggagcccggaaaatgtatgtcgacttgccagccatcattattcaacagattaatgacggcagatatttatcggtaaggaggaaatgcagagctattcgtcacgttcaatggtcaatgccacaccctggcccccgccgatacaaagcgttgccagtcctttgcgggcattacgtttcaccatttcatgaaccagagaaaccaggattcggcaaccggaagcgcctatcgggtgaccgagtgcgatcgcgccaccattgacattgacccgacgctcatcccactcaagcatcttgccaaccgaaagcgcctgtgcagcaaacgcttcattagcctcgataagatcaacatcagccaactgccagcctacacgctccaggcaacggcgggtcgcatacaccggcgcaattcccatcaatgccggatctacaccaacgctggcaaatgcgcggatgcgggccagcacgggtaaattcaacgctcgtgctttggcttcgctcatcatcattaccgcagctgcgccatcgtttatggatgatgcattacccgctgtcacagaaccgagactatcaaatgaaggatttaaacgggctaaaccttctgcactggcgtcagtgtgtggctgttcatcggtatcaacaaccaacgtctgaccgttactttgggtcattaccgggacgatctcatctttaaatcgtccggcgtcaatcgccgctcgcgctttttgttgcgagctaagtgcgtaagcatcctgcaattgacggctgatgccatattcgcgagccagattttcggcggtgacaccaatatgataatcattgaaggcatcccataacccatcatgcacaagactgtcaaccagctggctattgccaagctgtgcaccggtgcggctatcagtcagaacatgtggtgcgcggctcatgttttcctggccaccggcgatgacaatatcagcctcgccacactgtatcgcctgagtagccagatgcagtgctttaagcccggaaccgcagacgtcattaatcgtgattgcagaaacgctattaggcagaccacctttaatagccgattgccttgccggattctgccctgcccctgcagtcaacacctgaccaagaattacttcatccaccgcatatgcaggaacgccggtacgttctattaacgctttcacgaccagactaccaagttccacggcggaatgacccgctaacgcaccgcgaaagcagccgataggtgtccgtaacgccccgacaatcacaacgtctttcatcacaacctcgcaccaattaacagtgcaatagtaaatgattgttaattacagttatcttaattgtttaaaaaaagtgatttttatcacaaaggaaatatacctgagcagtagtcagagtcataactggcacgtaaggtttgcaaccactaccccaccaatagaggggtagatagggcgttaatctcccatacttaacctggtttatggtaaattgccctccattttgtttaatttgtagatgatacgttcagataatgtctaatatttggtctaaagaagaaactctgtggagtttcgcgctctacggcacagccgttggtgcaggcacgctcttccttcctattcagttaggttcggcaggggctgtggtcctgtttattactgctctggtcgcctggcctttaacatactggccacataaagc

SEQ ID NO: 1471 - DNA, 2325 bp, Escherichia coli
  Strain O55:H7
  modified_base (823)..(823): a, c, g or t
  modified_base (1090)..(1090): a, c, g or t
  modified_base (2324)..(2324): a, c, g or t
gccagttcatcctctcatcgaaaacatcagcaggtgaagggataacgggcgcggtaacacactactatggcaagaagattggtaatctgattaccacgctgtacttcatcgccttttttgtcgtcgtgttgatatatgcagtggcaattaccaactcacttacggaacagctggcaaagcatatggttattgatcttcgcatccgtatgttggtgagtctgggtgttgtattaattctgaatctcatttttctgatgggacgtcatgccactattcgggtaatgggatttttggtattcccattgattgcctatttcttatttctttccatttaccttgtaggtagttggcaacctgatctattaacaacccaggtagagttcaatcagaatacccttcaccagatatggatatcgattcccgtgatggttttcgcctttagccatacgcccattatttctacgtttgccatagacagacgtgaaaaatatggcgaacacgctatggataaatgcaaaaaaattatgaaagtcgcttatctcatcatctgcataagtgtactgttctttgtctttagctgcctgctttctattccaccttcgtatattgaagcggctaaagaagaaggggtcaccattttatcggcgctttctatgctgccgaacgccccagcatggttgtcaatttccgggattattgtcgcagtagttgcgatgtcgaaatcattcctgggtacgtactttggcgttattgaaggtgccacggaggtcgtcaaaacaacactacagcaggttggtgtaaagaaaagtcgtgcatttaaccncgcactatcaattatgttggtatcgctgattaccttcattgtttgttgcattaacccgaacgcgatttcgatgatttatgcgatcagcggcccgctcattgccatgatacttttcatcatgcctacgctatcaacatatctcatcccggcgcttaaaccctggcgctccatcggaaatctgattacgctgatcgtgggtatcctgtgcgtatcggtaatgttctttagctaatatccattgtgaatggttcaaaattgctacaattntgaaccattccagttttcataatgtgcatttgttattattccgctctatcacttctctcgtcatatcctagtattatcagttagttaaacacacaaagagatctgaacatcttaaataagactatttaagatgcataacttagattcgcaagatatcttctggtcattcaaaaacaatttgcgatatagatattctcataccatgagatagttatctgaaccaccctcaaccaggtaagattaaatcagtgaaacataatcatatttaataacgagaaatgtattttaaaatgtcttaatcagaattatagcaaatacagattaatcgcaatttttcccagcaaaattacaaaatcatggtgtattgacatcatcaatcaccaatgaaattatgcaattatatacggatagggaggttcttaacatggggctttgtagtcgttataaaagtcttacatgcaatagttgctcaatgcattgccaaataatgccagaagagtcaccgcgtttgcagtactgcgcaaactcgtgtttttgtatgtggcccgaagaaagttcatattttaatcgtggtgtggtagaaggtatcttaacaaaaaaccacaatgcgagattaagcggatatatttttgtcgatttttcagtaagttttttacgtctattccttgaaaaagactggattgactatcttgcaagtactgacatggggattgttttagtcagcgaccgcaatatgcaatcgttagctaattactggcgaaaacacaactctgcaatatctgctgtcatatataatgatgatggtcttgatgttgccaatgaaaagatcagacaactatttattggtcgttatttatcatttaccagaggtaacacattaactcagatggaattcaccataatggggtatatggtttctggttataatccatatcagattgctgaagttctggatatggatatccgtagcatctacgcgtacaagcaacgaatcgaaaagagaatgggtggtaaaataaacgaattatttattcgttcacattcggtccaacattgatactcaacaatctgccagaatcatactctgtttatacgggcatttattgaaatgcccgtattttataaataggccgtcccctcaagagtaaacaccatagtatttaaaaccatcacacgaaaaattcagaagcattacgaaatatgaacttacaaacaatagtggcataaatgttanc

SEQ ID NO: 1472 - DNA, 48 bp, Escherichia coli
  Strain O55:H7
attttacgttgcgacattaaagcctcatttcaatcatcatgataaata

SEQ ID NO: 1473 - DNA, 2988 bp, Escherichia coli
  Strain O55:H7
  modified_base (897)..(897): a, c, g or t
  modified_base (2796)..(2799): a, c, g or t
tttatgccgtaaataccaatatacttagcaaactatgtgatttccatttcgattgatttagtgtttattgacgtatgtactggattattaacgataatatcgagttctggcctgagcaccgaaaattaatatcggtacataacgccgatcttaacgtcgttctgacaacgccagccagtcgttgtttatcactgctacttgaagcttttcctgatgtggttgcacaacaagattttttcaccagagtctgggaagaagaaggtatgcgtgtgcctactaacacgttatatcagaacatatccattatcagacgcggatttcgcgctgttggtgatactacccactcgcttattgcaaccgtgccgagaagaggattcaagatccataatgacattaacatacaaaatcatgtaataaactcatcaacagacgcacatacacacaatgccccacctgccataaaagttaatgcgggatacaaagagagcattggtggcgcaaagaatttcaataacaaaatcctcaaacatataaaaagttatctaattatgttgagcgcatttgtcataggcgcatattctgcatattggctatggaataataatcaaccgaagccatttttcaaggattacaagactgttgcggaaattaatggctgccattttaatgtaacagaagatacaattgatgggttgaaagagttcgataaatataaaacacggatactggattcggggattaactgcaaaaaatatccgtggttatacttccctcttgcaaaatcctcaccggggatgattgttatggcatgcaataaaaactataaccaacatgaagtggcaggctgtttaaccctgtcttaccgtgaggttaatcgtggttgattataaaaaaaanttattatttattttagtttttatcagtgggtttattctcttcactgtctattcttacactgcagaaaaaatgatatataacgaaacatgcactgcaaattgggtaatttttaatgaccagggacgagcaaatcttaccatagactttatgtataacaaaaaaaataaaacaggaactgttgcgttgagtggaacctggcaacaaggtaacagagaaagtaaatcaatacggcgaaatattgaatacacatgggttgaaaactatgacacagcccatttaacatcaaagaaagttataagtttgagattatggatcaagtcgatgatgatagacttgcagaacttattcctgatttttatgtctttccagaaaaaagtgtaagctataatatactaaagcaaggtaagcatgcttttattttgagcattggtaacagagcaataatgcattgtgcaaggtaaactaaaatagataacaaaaagatggaacctcgttaatcataaaacaataaaattaaatattctcgcagtatatggcagtctaaagcatcaaagttttgatcaacatctttcattttagacatctccttacaatgtaaaatatcatgtatcaacaacatctggtgcaaatccatgagtcgaactcgacattcatcttagctcgattattattccttcgtacagtcgatgtaaacaatacagaaagaggattattaagaaccagtttactcagtgaatcaatagaggaaaggactaacgtttctttaaaagaattgatttcatcatctgttaaactaaactcatcattgacagatcgtgagatataactgtttttaactttactctttacgttgactttattgacagaattaacattcacaaatcttgaatttaatgcccatgatgttgtttgcgtgagaaccttctcagcattaaggaatttttttaacggaatccttggtttctttttcgagtccgaatttacaatatcatgcatatagaccatttcatgaatctgcgaaaactcaatgtccattatatacctcacatttttaccgtgactcgatgttactgttcaataatcaccttccatcaatactaaaattaatacccctaatgtgccgataacaaatatagtcattctacgtaacgtctccataaggtgataaccttgatcaaatgaatttcgaatataataaaggaaatcttttgagatgtttatcacgaataaagctatttatgttaccaatatcatttcgagtacgcacactatctatctgttttttaaggatataaaaaacaacatgtaagttatgtaaattgccgatgctactaagtaacattatagtaaaaaaagtaaaaatgagcgatttttgatagaataaagcatgagaaaaggtgatatttgacattatcagaagctgcgaattcggattttgctctaatcaaatgagagaaatgtaaaatgaagccacgaaatattaataatagcctaccactgcaaccattagttcctgaacaggagaacaaaaataagaaaaatgaagagaaatccgttaatccagataaaattacaatggggtctggtttaaattatattgaacaagaatctcttggagggaaatatctaacacatgatttgtcaataaagatagcggatatttctgaagagataattcagcaagcaatattatctgctatgagcatatataaatttccgataacagatgatttaatgagtatggctgtaaatgaactcataaaactgaccaaaatagagaataatgtagacctgaataaattcactactatatgcacagacgttctatcccccctcgtcaccaaacataataaacaaaaaagtcaaaacgacattctacccttcgcaaaaatccccttnnnnattttcattgaaaaaatggaaattgataatatgaatccaggtcatgtacattaaggcattttgaaatatcataattaggataactaataaggtgaatattagtataacagctgatgatgttattaatttgtagtggaaagtattttaactaataatgaagaaatatactcataagcaatgcaagcttaa

SEQ ID NO: 1474 - DNA, 3433 bp, Escherichia coli
  Strain O55:H7
  modified_base (2)..(4): a, c, g or t
  modified_base (7)..(9): a, c, g or t
  modified_base (618)..(619): a, c, g or t
  modified_base (699)..(702): a, c, g or t
  modified_base (1183)..(1186): a, c, g or t
annnttnnnaaaagataaatataaaaatatcaatgagtcaatcaataataatttagcatcacgagacacatcacagaggaatattatggacacagaaacaattgaaatattcaataatagtgatgaatgggcaaatcaactaaaacacgcattatcgaaaggagaaaatctggcattactacatggtttgactcctgatatccttgatagaatatatgcatatgcattcgactaccatgaaaagggtaatgtaacggacgcagaaatttattataaattattgtgcatttatgcgttcgaaaatcatgaatatctaaaaggttttgcatcagtatgtcagtcaaaaaagaaatatcaacaagcatatgacctttacaagctaagttacaattactccccgtatgatgactattcagttatttatcgtatgggtcaatgtcaaattggggctaaaaatatcgataacgcaatgcaatgtttctatcatattattaacaattgtgaggatgctagtgttaagagtaaagcgcaggcatatattgaactcttaaccgataattcagaagataatggctaagcattacaatcatttggttaaaaatgctggttatagtgtanntaaccactatgaccagcacctcttatgctttcttaaatcaacatcttaaaacagttaagaacacactaaaaaatattatnnnncaacgcgttagagaacaatctattttatcaaaattgaataaggctatttcagattacatcagtgaattcctaagataaattagtgaacacaaccatagatatgtcgaatgtaaactcctgtagcgttaatgacacataaatatgaatagccataatttctattgcttatgcaggatgcaagaaaccaattttttcatagaggttaactaatggacttagaaaataaattctcatatcattttcttgagggattaacgctcacggaagatggaattcttactcaaggaaatgagcaagtttatattccaccgaaagagttaggtgtattaatagtattacttgaatccgctggtcatgtcgtactgaaagatatgatcatcgaatcagtatggaaaaatattattgttagtgatgagtccctgacaagatgtatctattctttgcgctgcatttytgaaaaaattggctatgatcgttgctnnnngccagctcgcataaatttcgcatacttcacccacagaaacgtcgtcaagttctgcttcaatcagagagccgtttatgctatgtaagtagctgtatttatttaataattttaattttttcataccagcatgctccatatcgcaagacattatcctaaatagttttcagaatattaacgggaacattttccgttagttccccgtacgaaagtacttcgaggtctcgataactagattcaataagttttttgataaaacgacgaatatccacagatcccagtaaaataatgtctttaataggaatattgattccagaaagtgccagtttaaaattatccagaatcatctcagcttcggatgcatcgagattaagaaaagtaccgccagcggtaggcctgacaccatctctgattctgtcctctatttcaggcgaaatcacaattgctttaatttctccagaatatgaaaacttatggcaaatgtagcgacctaatgtacctcgtacatgctcgacgagtgtgattatatctttctctcgtgggctccataatgctaaggcctccataactaaccgcatattgcgcactgaaattcgctcctggatcagacgctgaattacctctgaaatgcgctgcacggttatatatcttaatatttcttttaatagatcagaatacttcatctctaattgatcaagaatatattttgtttcttgtacaccaaagtactcattaatattatgagccagacagacagataaatgattatacatttcatccatggccgtgcgagtataacagccaatttttgttaatttttgagcatcacttttcgtaacccaataatattgttcaccattactatttacaatgacaggtttcttgatcaaagtcgaaaccacttcatctgaatattcaaccaacaagacaagatcatgataaattttaaattgtgaagctctgacttcatttagcattaatatgacatcttcatcattaagaccttccccctcacgaatgacaataccgggaatgcggataccatactcaataaaaaactgactacgaatcctatcagcaagattgatttcagtgtattttttagcctgtacactattcataatcaagaccaagggtaccgtttcggtaataacctgatcaagtttattaatgatacctaatgagatatcatcatcttgattatagggttccaacccaacggtaatatctccctcaacaaccgtttcttcagtccctttctttttgaatttaaagtaaaagtaaattcctaagattactgccaaacataaaaacactagaaggggaaaacctggaagcaacccaatacttagcgcgaggacacatgtcacaacaatgacaaaagaattacttaataactgggacattatattttgccccatattatcactatcgccatttacgcgcgtaacgataaatcctgcgctaatagcaattaataaagctggaatttgagaaacaagaccatcaccgacagtaagaattgtgtagacagtcaacgctgttgagaaatccattccattttggcctactcctactgatagcccaccgataatattaacaaagataataataatgtttgcaatagcatcacctttgataaatttcatcgcaccatcaaaggaaccatacaactggctctctcgttctaatacactacgacgttcttttgctaaatctgcatcaatgatcccggcgcgtagatcggcgtcaatgctcatttgtttacctggcataccgtcaagcgaaaagcgggcagcaacttcagccacacgttccgaacctttagtaatcacgataaactgaacaatagtaacaatggagaaaataacaaaaccaactaccaggctatctccaataacgaactcaccaaaactcgttataatttctccagcatccgcctcaagaagtataagtcgactggtactgatcgccagcgccaaacgaaataacgttgtgataaggaggattgatggaaatgaagaaaagcttaagatcctatcaacatagaatgatcctaaaaatacaagtattgccaatgttaagttaagcccaatcaaaaagtcgattaaataggtgggcaatggaattatgagcatggcgataatcatcaccattaatccaagaattattaattctggatgactccttaaccctaccaaaactttgttaaacattgaacatcaccttcttccatggttttttattttg

SEQ ID NO: 1475 - DNA, 89 bp, Escherichia coli
  Strain O55:H7
tgttacagttttgtgtatcaaagagctctgctgcaaatgttacttttattgcctgtttacaacactccctaatctctaataattgttca

SEQ ID NO: 1476 - DNA, 2571 bp, Escherichia coli
  Strain O55:H7
  modified_base (156)..(156): a, c, g or t
  modified_base (337)..(337): a, c, g or t
  modified_base (1327)..(1328): a, c, g or t
  modified_base (1351)..(1351): a, c, g or t
  modified_base (2065)..(2065): a, c, g or t
  modified_base (2423)..(2423): a, c, g or t
aaaagtgaaaatggaagatttgtacatccactgtaaatcgccttcaggagtaacgttttgtctttataattagcatctgcgggaagggtcaccagtgcattgttcaggagttcctctgcagtctcaggaaattttattaacgatatcagaaaaaanatccagtaatcttctgcgctgataaattttttaattattgggttattcattaaatttttcagaaataaagcctctgccgactgaagagacaatagttgtgacaacttattgagaaacataccaaattccaatgatgaacaactcgcatcaagtgcatttatatctgagaaaagcgtctctntgataaattttgtcaccaacattctattttgatagccataactaccaatccattcgacataagtatctacagcatcgtcttctgccattaaaaattgccgataactcgcccttagtaattttggatttaatgacagcgcctggccaaataactttgcttttaatgccgagttaattccgctattaatgaattttttagtagtctcttgattaacttttctaagtaatgcttcagcgtttagccggacattttctgatatttgttttttacgtaaaattgcacgtaacacaactaccagatcgctttcatctgggaataattttttagcaaagctatacacttcatagtcatgggtagttgcagccttaagcgcctccataactttgtcggttttttctattggctggtcttccaggacatattcttctccgtccagaaaattggccagttgttcttcgtaaatttttttcttcataaactgcgttaacgctgctgacatctcgtcagtagcttgtaagaaccgagcttctttacctgcgggatcatcccccattttaggcatttcagcttcaatgtcttcattatcttctgtgataatgtcctctaagcgagaaacttccctggctctttctaatacaccgacatgctctacatgaatcgccatttcactatcctccgacgacttcacgattcagataagtttttatccatttctgcagtaattcatcgttgatttctttattttttgccatttgctgtgtaatcgctctggcatcaaccgcagcctcattcgcattattcatcatgcgttcatcgatctctcttggctcaataagaaagacacgaacgatgttattcgcatttgttccttcataaccaaataatttaccaataaatggaatgctgcctaatattgggatcttgcgactttcataggtattcgtatcgcgtgtatatcccccaatcaaaagacttttcccttggggcacnngtgcaatagtacttataagtgtnctaccaacctgaggcagatcatcaacattggtcttgtcggaattgatttcatttccatcttcaatattcaagagtaattcaatttgatttcgcgcagcaaatcgtggtagcacgctaatcatcgtaccataggttacttcatccaattccgcagtacgctcgccgactaatttagtatagaaagtgcggttattatcaaatatagcaggaatattctcttgtgttaaaacgacgggacgagcaacaacggcggctcttcttttttgtgcaagtgcctgtattgttgcaataaactgtgtcccatcaagggtactaattgaacctgaattattaaatgatgcacttaagctggatccaatttttatcgtgcccgaccagtcagcacctagctgttctagatcagtcttatcaatatctattatccataaagataattcaatgtgtcgctttggaatatcaagcgtagctactaacttctcgataaaatcaacctgagatactgttcctttaacaagtaaactgttggtatcaggatatgcaataatttgtatatcgtcagtctctggcgctcctgctgtcgatattattttctctacttgtaggtcatcatcttcttcagccccaggaaaaggaggcatacgtgatacgttttttagttgttgacgacttgaaatttcagaaagtacgttcacccctgtgctttgcttaatgttnttatttaacaacgtcgatagtacttttgccatgccaggaataactatcttttcgccacgtaactcataagtccggtcattaacgaatgtgttgaccagatgaattattcctactttatttcgaccgatctcaatgccatcgctgttttgctccattaatttcgcagcattaacgaccaggtcaacataaaccggtggccccgatacatagaaagtaccattgccgtcccctttaatttcataacgagagttatacagacccgatttttttaagaaattattaaactcattcgtcgatacctttctcagattaatcaatgcattacgcatctctgatgagtcatagatataaatagctntgccatcatcataccaaataagccccatctgtgccgacaggcgttcaatcaaggcatagggttctgttaaatcaaaatttccgctgatctgtttcttcatggcaagcttactaactattgtaggcttacccgcatatgatgaaaccgt

SEQ ID NO: 1477 - DNA, 3598 bp, Escherichia coli
  Strain O55:H7
  modified_base (2519)..(2519): a, c, g or t
aaactacgtagattttctttatttgctacgtatccattctctgctgcggcatatgcaccaggagtcaataatccattaaaaatgcataagactgaaattaatataatagtaatgcgtaattttattttcataactttttacatagttctctcggtgtttttcctaaccggctttttacttcggctgaaaagtgtgatgaggacgagtaaccatatttatgcgcaatagttgtcatatcactgtttccttcaatgatttccaacacggctctggcaactctccagccacataattccgttttaactttaccacccaatgcataactacataaacggcgaaaatgtgaatacgatacgccgtaaagctcaccaagatcatagagtgaagtctgtatgagcgattgcgataataaataacgaaccagtttatagcattctgtttttcttagatgctgaaacaggatttcattaatattatcgctgctcagataagtggctaaaaaccaggcttcacttgcaactttactgaatagcacaacttctgatgcaaagggcaaggcatcagcaaacaattcatggtgttccctttccacactccccgttgattcatctataaaagctaataatttactcaggatatcaatgcgaagtggatgataaattactttccctgcagttacctcaatttggcttcggtcaatgagcagtaatatatcttccactaccattaatttttgatggttattaccaatcgtaataacaagggttacatccttgttttcatttccccgtaagaaccacatttcagggtccagtagggttaacttctgtccttgaagcaaaacattcattggaagtaacagcccttcttcaatcatgtttcatctccttattccatattctcattctccataaacttgctataaaaacatgattaaaaagtgatgattactatttataaaataatgattttgttatgagcgaatagctatcagccacttacactagtacgtcatcctgtccatatacagatttgtaactgttgatatgttttacttaaacacacctcgtattacttataacacttgtttggtaactattttcaatacaaatcatatttgttagttcttcattaacacactgcgagtgttttgttactccccgcatatattttattctcttgttcgattctatttttcttaatcgatcatataattttcttgttagtcggatttacgaatcatgagacttataatggaaggaatgagactaagcggccaggttaaacctgtaattattgcagcaaacaaccgatatgttactttttcttccgagaagataaatattaaagttgatgtcacaaccagacctatcaggtaagctaacagtaatttattgatcacttttacctcccctttcgatttctctttgagcggtccttttaatccaggaccgcctcattatgaaaattatttaattccctcatcattgataaggttggacatctctttcaacatgagagtcattgaagctttcgaccaatttagcggaatgatagggcttggcgcttcatgcaaagttcccgacttgtggatatagttatagctttcgggaagtgccatttctggtacgctcctgccatttgcaccaatcatattctcgcctgttatttgggccaatgatctattcataaattgtactgagtcattcaaatactcttcttttcttgattctttataaacaattgctgctgattttgcataccatgagtcaaaaaaccattctgcttctgttgatggaatgaagctcttttctctttttgcatgcgaattttgatcggtatcggttttaatatcattgaaccaaaaatttgccgactgataattatccttctcgtatctttttataccatacggacctgctagttttttaactatttttagaacttgctcttttcttctggtgtttatctttgaaagatttgcaggataaataacattaagtaaagccgcatcggcttctctgtaatgtttatctttttccagataacctggggattctccccctaaatcaagctgtaacgttattctttcataacctttatctatgaggtggttcaacctcgttgttgaaagagtttcatccagttcattgactttagcttcgcgtagtaaatcagagacaaaaacagagtctttcttcgagagtaggtttgacaaacgttccagtccagaggtcaccagtgcaacggaagatgtgtttaatcgggcatcttcctcccacgctccggaatcttccataacatagaaattggctttatccagataagcaatcagcagcgcaaccgattttagtcggtcacctttttgccaatcttcagcgttaatagtaccagtattgattgcttgtataaggagatcaagataaagacctaacgcatcattttgtttatggttccacagctgcggcttgccttcttcctgcacatctgccatcacgggggagttgctgtcaaatatncacagcattcatttgcccgggaataccatccagtcgttttgggttgctaatgatgtcctgcatccgcttaatctggtcgggcgtagacatataatcccacagggtgagcagaaccttttttgcggctacactatttccctggtctgatactaatgccatatagccccataaactatccctcagccagacagcatcatagtgggtttctgccgctgttttgtcatcttcgaaagtagaagcaagaataaacgttccccagggtttctccgtcaacgttaactttcgtgtgttttctgttaatgttagcaatccttgaatttcgtctttggtatagtggctctttatttcattttgtaatttggctgagtgaatcagaagacgataattaggatacttatctggatttaacgataaataacttttatctgttgctgcccccgtggaattaagaatgttaaatacagatttactcgtcacttctgcccctgtcgcctggcatgtgccgcacgaaaatataccagcgagcagaagagttaatgcagatttccctttcataaaatattccatcaatcgtttgttaaaagcgtagataaccacttatttaacaacttgaaaataaggtattttacctgggttgttacaaaaggattgcattgcgtaaacgctttttatttacaaaaaaatgggggagtgttacagagattgcgaaaagtctgaagcgattgaattaagataatatagaaaatcagatacagcaaaaatggcagattgatgaggtgaagataaattggagcgggcgaagggaatcgaaccctcgtatagagcttgggaagctctcgttctaccattgaactacgcccgcttcgagatgcgtaaggcattataaaccttacgctcttcttagcaagtgccgcgctgctgactgctgattaattcgccatcagcattttggcttgctgccctgaggcggcaagtaacgtagcggatcaattgccgttgcacggtaacgaatctggaaatgcaggcgaacagatgccgcatccgtgctccccatggtggcgattttttgcccagccttc

SEQ ID NO: 1478 - DNA, 4191 bp, Escherichia coli
  Strain O55:H7
  modified_base (2363)..(2366): a, c, g or t
  modified_base (2655)..(2657): a, c, g or t
  modified_base (2837)..(2837): a, c, g or t
  modified_base (3574)..(3574): a, c, g or t
tttgcccattatttaccagcatcgtgtcattatgggcgtaagccgtaatgtaatcttcactgtgtttaatcatgatgagattaccgtagccacgcagctggttgcccacatacaccacctttcctgcacccgcggcgtaaataggtgtaccccgtggagctgagatatcaatccctttattgccgccatctgctgtcgaatacggcatgataactttccctgtcgttggccataaccaacaacgttgccctactggcggccaggaagatttcggtaccgctgatgacggtgtaaccgatgcggttttggtcgttgatttggcggttgatttacgtgtactactgctacttttcgccccacccagttttagtttctgaccaacttcaatggtgtaagggggggaaatgccgttcagtcgcgccagctcttttacgctggttcccgtggtgcgcgaaatacgatatagcgtatccccccgtttcacggtgtaaacggagccggaatacgttcctgtatcggatgatttgctacccgaacagcccgccaaaagcagtccaaccgataacaacatcacgatacccagagattttttattcaggcgtcccgcactcaaaatctttcctcgcttaaaaaacaagacgccatatcatagcagccagcctcttgatacccaatctcttgcttctggaaaaacgatgtaatagagaaagaggttaatttcatttggcaaagggaagtatcatcagcaaaatattcactgtagaggtatcgaagttcctgacttttttaccctatttcccatcctgatgcgtaataatcctaatttatcacattgattttatcgccactcatattgatacgtatcactacccctattcagggtcctgtttcgtatcatatctgtgtttttttaacatcatcacacttccttcctcccttaacgcttatcgtcgtttctggcgtaaatcttgcctgcttagactaaatctttgccataagaaccaaatgttcaaatcgaggggatttctatggaagcgcgggaagcaaccgctacgggtgaatcatgcatgcgcgttgatgccattgctaaggtcaccgggcgggcacgatatactgacgattatgttatggcgggcatgtgttatgcgaaatatgtacgtagccctatcgcacatggttatgccgtaagtattaatgatgaacaagccagaagtttaccaggcgtactggcgatttttacctgggaagatgtgcctgatatcccattcgctacagctgggcatgcatggacacttgacgaaaacaagcgcgataccgccgatcgcgcactgctaactcgccatgttcgtcatcatggtgacgccgttgccatcgtcgtggcccgcgatgaactcacggcagaaaaagcggcgcaattggtcagcattgagtggcaagaattacccgttatcaccacgccagaagcggcgctggcagaggacgctgcaccaatccataacggcggcaatttactgaaacaaagcacgatgtcgacgggcaatgtccaacaaacactcgatgccgccgactaccaggtacaggggcactatcagacccccgttattcaacattgtcacatggaaagcgtaacatcgctggcgtggatggaggatgactcgcgaattaccatcgtttccagcacccagatcccgcacattgttcgccgcgtggttggtcaggcgctggatattccctggtcatgcgtacgagtcatcaaaccatttgtcggtggcggttttggtaataaacaggatgtactggaagagccaatggcggcattcctgaccagcaagcttggcggcattccggtgaaagtttcccttagccgtgaagagtgtttcctcgcaacccgtacccgccacgcttttactattgacgggcaaatgggcgtgaaccgcgacggaacattgaaaggttatagtctggatgttctgtctaacaccggcgcttatgtatctcacgggcactccatcgcttctgcagggggaaataaagtcgcttacctttatcctcgttgtgcctacgcttacagttcaaagacctgctataccaacctcccctcggctggtgcgatgcgtggttatggcgcgccacaagtcgtatttgccgttgagtctatgcttgatgacgccgcgacagtgttaggtattgatcctgttgaaattcgtttacgcaacgccgcacgcgaaggagatgctaatccgctcacgggcaaacgtatttacagcgcagggttgccggagtgtcttgaaaaaggccggaaaatctttgaatgggaaaaacgccgtgcagagtgccagaaccagcaaggcaatttacgccgnnnngttggcgtcgcctgttttagctacacctctaacacctggcctgtcggcgtagaaatagcaggcgcgcgccttctgatgaatcaggatggaaccatcaacgtgcaaagcggcgcgacggaaatcggtcagggtgccgacaccgtcttctcgcaaatggtggcagaaaccgtgggggttccggtcagcgacgttcgcgttatttcaacacaagataccgacgttacgccgttcgatcccggcgcatttgcctcacgccagagctatgttgccgcgcctgcgctgcgcagtnnngcactgttattaaaagagaaaatcatcgctcacgccgcagtcatgctacatcagtcagcgatgaatctgaccctgataaaaggccatatcgtgctggttgaacgaccggaagagccgttaatgtcgttaaaagatttggcgatggacgctttctaccaccctgaacgcggcgggcagctntctgctgaaagctccatcaaaaccaccactaacccaccggcgttcggctgtacctttgttgatctgacggtcgatattgcgctgtgcaaagtcaccatcaaccgcatcctcaacgttcatgattcgggccatattcttaatccgctactggcagaaggtcaggtacacggcggaatgggaatgggcattggctgggcgctatttgaagagatgatcatcgatgcgaaaagcggcgtggtccgtaaccccaatctgctggattacaaaatgccgaccatgccggatctgccacaactggaaagcgcgttcgtcgaaatcaatgagccgcaatccgcatacggacataagtcactgggtgagccaccaataattcctgttgccgctgctattcgtaacgcggtgaagatggctaccggtgttgcaatcaatacactgccgctgacgccaaaacggttatatgaagagttccatctggcaggattgatttgaggataacatcatgtttgattttgcttcttaccatcgcgcagcaacccttgccgatgccatcaacctgctggctgacaacccgcaggccaaactgctcgccggtggcactgacgtactgattcagctccaccatcacaatgaccgttatcgccatattgttgatattcataatctggcggagctgcggggaattacgctggcggaagatggctcgctacgtatcggctctgcaacgacatttacccagntaatagaagattctataactcaacgtcatctcccggcgttatgtgctgcggcctcgtctattgctggaccgcagatccgtaacgtcgctacctacggtggaaatatttgcaacggtgccaccagcgcagattctgccacgccaacgctcatttatgacgcgaaactggagatccactccccacgcggtgttcgtttcgtcccgattaatggctttcacaccgggccgggcaaagtgtctcttgagcatgacgaaatccttgtcgcctttcattttccgccccagccgaaagaacacgtgggcagcgcgcattttaaatatgccatgcgcgacgcaatggatatttcaacgattggctgtgccgcacattgccgactggataacggcaatttcagcgaattacgcctggcatttggtgttgccgcgccaacgccgattcgctgccaacatgccgaacagactgcacaaaatgcgccattaaacctgcaaacgctggaagctatcagcgaatctgtcctgcaagatgtcgccccgcgttcttcatggcgggccagtaaagagtttcgtctgcatctcatccagacgatgaccaaaaaagtgattagcgaagccgtcgcc

SEQ ID NO: 1479 - DNA, 12368 bp, Escherichia coli
  Strain O55:H7
  modified_base (99)..(99): a, c, g or t
  modified_base (1720)..(1720): a, c, g or t
  modified_base (1876)..(1877): a, c, g or t
  modified_base (3116)..(3116): a, c, g or t
  modified_base (4793)..(4793): a, c, g or t
  modified_base (6793)..(6796): a, c, g or t
  modified_base (10407)..(10407): a, c, g or t
  modified_base (12077)..(12077): a, c, g or t
  modified_base (12235)..(12235): a, c, g or t
ggggggaaaattgcaatgaatcacagcgaaacaattaccatcgaatgcaccattaacgggatgccttttcagcttcatgccgcaccaggcacgccgctntcggaattactccgcgaacaaggactgctaagtgtcaaacaagggtgctgcgtgggtgaatgtggtgcctgtacggtgctggtcgacggcacagcaatagacagttgcttataccttgccgcctgggctgaaggaaaagagatccgcacgctggaaggtgaagcgaaaggcggaaaactttctcatgttcagcaggcttatgcgaaatccggcgcagtgcagtgcgggttttgtacgcctggcctgattatggctaccacggcaatgctggcgaaaccacgcgagaagccattaaccattacggaaattcgtcgcggactggcgggaaatctttgtcgctgcacggggtatcagatgattgtaaatacagttctggattgcgagaaaacgaagtaaaaggatatccggcctgaattcaggccggattcactgatgttatgtgtttaacaactcatatttcttaatcttgcgatagagcgtagcaatgccgatgcccagttcatcagcaacttgcttcttgctgttatgacgtgaaagcgcctcgcggatcatttgcttttccatctcctccagcgccgtgccgcccgcatcatcgagtgacaggtgtgcctcagtaacctctgttacatcactttgctccgttgtgccattattcagcagatttggcggcaatagcgtgctgtcgataacttcacctgaaggaacaacgttaaccagatattccatcaaattgcttaactcgcgcaggtttccgggccaacgatgcttacgcaatatttcgacgacatcgggagcaatgccaggataaaccgatcccagacgacgggtatgcagatgtaaaaagtaatgcaccagtagttcaatatcttcctgacgttcacgcagcggtggcagagttatcgggataacattaagtcggtagaagagatcttcgcggaatttaccttcggcaatgaactgggccaaattctggttagttgcagaaatgatgcgaatgtcgacttgtattgggctactggcaccaatcggcagaatttcacgtgcctcaatagcgcgcagtaatttagcctgcaacattaatggcatatcacctatttcatcgagaaacagcgtgcccgtattcgccgcctgaatcaaccctgttttaccgttggcagaagcgccagtaaatgcgcctttaacataaccgaacagttcgctctccagaagctgctccggaatcgcggcacagttgatagcaataaagggtttattccgtcttccgctcaacttatggattgcacgggcgacaacttctttacccgtgccgctttcaccaaccaccataacgctggatgggctgggtgcaatacggctaatgagtcgttttaattgccgcataacacggcactcgccaaccaattgttcaatatgcggttcatcaggtgcatttgctacagaaaaactggtatgcgattggtgaaacgccattaaaaataattgtcggccctgaatgttatgcaattgaccaatgattaattcacttttatcgtcccacgaaacaatatgctgcatatgtccatgggtaaaattactctcaaatgttaatggtctgaaacggataggtttcccaataatattnttttgcacaacaccaagtgtttttaaggcagtctgattaacaaactgaacccgactttcatcatcaacaactaatacgccctgatccatattatcgatcatggtcgcgaatattttactgatgttatctcctggcccctgatcctccagaagtttnnaaacaaaaatggtggatatatggcgaacataatcagaaaattcgcgtaaattatcactgatatgctcttgttgctcgtgggtaacggcaatcaaacttatcaccccaacacaacgatcctgtaaaatgacaggcgtacccagaaatgctttttcgcggcaattttctttactatcgcaaccttcgcaaaggggatcgaagcgagactgtgtcacaactttttcagttttcgtttccaggacgtggcggagcaggcgtgagttgccgctcaactggcgaccaagaaacttcccatacgcgcccgttccggcgacgcgacacaagttttcatcaacgatctcaacctcaagctgcaaaacgctggcaagcattctggcaaaacgctgaattgtcggttgaatttgcatcaatactgactgcgtagtagcaagctccatagctttaccttccagacttacttaaaagtcgatcattgaagacgttgatggttcacagatcatgatcatattaactcaggcgaaattggctttgataaaaacataagatttttatcactttctaatgaaattatggaagagatatcacatttctatatcaatatgagaattacggcggtgagtttatcaaactgacgagggatagcctgtccctttatcttatttctgatacttagcagcaaataaataacgcgataaaaaaagccaaacgttttcgtattttacaaacaaccggaagctggcatcaatttgtgatcaaccccacacattatccgtcaaattagtcttttgcagccccgtggataattctggcacacttattgttagtcccaggtatagctgtgaaaacaccaatcactttggcaagtcacagtgaaataaaccactttgcctgtcattccactaccgggactttatgatgaaaactgttaatgagctgattaaggatatcaattcgctgacctctcaccttcacgagaaagattttttgttaacgtgggaacagactccagatgaactgaaacaagtactggacgttgccgcagcattaaaagcactgcgtgctgaaaacatctcaaccaaagtctttaatagtggattaggtatttccgtattccgcgacaactccactcgtacccgcttctcttatgcttccgcgcttaacctgctcggccttgcacagcaagatctcgatgaaggcaaatcacaaatcgctcacggcgaaaccgtgcgtgaaaccgccnatatgatctccttctgcgccgacgctattggtattcgcgacgatatgtatctgggcgcaggcaacgcctatatgcgtgaagttggcgctgcacttgatgacggttacaagcagggtgtactgccacagcgtccggctttagtgaacctgcaatgcgatattgaccacccgactcagtcaatggctgacctggcatggttacgtgaacactttggttcactggaaaacctgaaaggtaaaaaaatcgccatgacctgggcctactctccaagctatggcaaaccgctctctgtaccacaaggcatcatcggtctgatgactcgcttcggtatggatgtcaccctggcccatccggaaggctacgacctgatcccggatgtagtagaagtcgcgaaaaacaatgctaaagcatctggcggtagcttccgtcaggtcaccagcatggaagaagcgttcaaagatgcagacatcgtttatccgaagtcatgggcaccttacaaagtgatggaacagcgtaccgaattgctgcgcgctaacgatcacgaaggcttaaaagcactggaaaaacagtgtctggcacagaacgcgcaacacaaagactggcattgtactgaagagatgatggaactgacccgtgatggcgaagccctgtacatgcactgcctgccagctgatatcagcggcgtatcctgcaaagaaggggaagtgactgaaggcgtattcgaaaaataccgtatcgctacctacaaagaagccagctggaagccttatatcatcgccgcgatgatcctgtcccgtaaatacgccaaaccaggtgcactgctcgagcaactgctgaaagaagcgcaagaacgcgtgaaataacccctcgggccgatcagctggtcggccctctatttccagaggccaaaaggataggatatgtccgttttctcattgaagattgatatcgccgataacaaatttttcaacggcgaaacatcaccgctcttttcgcaaagccaggccaaactggcgcgccagttccaccagaaaatagctggttatcgcccaacaccgctttgtgcgctggacgatctcgcaaacctttttggggtgaagaaaattcttgtcaaagacgaatcaaaacgattcggtctgaacgccttcaaaatgctcggcggtgcgtacgctatcgctcaattattgtgtgaaaaatatcatcttgatatcgaaacgctgtcatttgagcacctgaaaaatgccatcggcgaaaaaatgactttcgcgaccaccaccgacggcaaccacgggcgcggtgtggcgtgggcagcgcagcaactcggacagaatgcggtgatttacatgccgaaaggttctgctcaggaacgcgttgacgccattctgaacctcggtgccgagtgcatcgtcacagatatgaactatgacgataccgttcgcctgaccatgcaacacgcgcagcagcacggctgggaagtggtacaggacacggcatgggaaggttacaccaaaatcccaacctggatcatgcaaggctacgcaaccctggcagatgaagccgtcgagcaaatgcgtgaaatgggcgtaaccccgacgcacgttctgctgcaagccggtgtcggagcaatggccggtggtgtgctgggttatctggtcgacgtctatagcccgcaaaatntgcacagcattattgttgaacctgacaaagctgactgtatttatcgctccggcgtcaaaggcgacatcgtcaacgttggcggtgatatggccaccatcatggcaggcctggcctgtggcgaacctaacccgctgggctgggaaatcctacgtaactgcgccacccaattcatctcctgccaggacagcgttgccgcattaggtatgcgcgtgctgggtaatccgtacggcaacgacccgcgcatcatctccggtgaatccggcgctgtcggtttgggcgttctcgcagcggttcattatcacccgcaacgtcaaagcctgatggaaaaactggcgctgaacaaagatgccgtagtgctggttatcagcactgaaggcgacaccgacgtgaagcactaccgcgaagttgtctgggaaggcaaacacgctgtagcaccttaatcaccctattggaactgctccctgcaaaacggggagtaaaaaatctggagaaaaataatggctaagaatattccattcaaactgattcttgaaaaagcaaaagattaccaggcggatatgactcgcttcctgcgcgacatggttgctattcccagtgaaagctgcgacgagaaacgggtagtacatcgtattaaagaagagatggaaaaagtcggcttcgataaagttgaaatcgacccgatgggtaacgttctcggttatatcggccacggcccgcgtctggtggcaatggacgctcatatcgataccgtcggcattggcaacatcaaaaactgggacttcgatccgtacgaaggcatggaaactgatgagctgatcggtggtcgcggtacttccgaccaggaaggcggcatggcatctatggtttatgccggtaaaatcattaaagacctcggtctggaagatgaatataccctgctggttaccggtactgtgcaggaagaagactgcgacggtctgtgctggcagtacattattgaacaatccggcattcgcccggaatttgtggtcagtaccgaaccaaccgactgccaggtataccgtggtcagcgcggtcgtatggaaattcgtattgatgttcagggtgttagctgccacggttctgcgccagaacgcggtgacaacgccattttcaaaatgggtccgattcttggcgaattacaagaactctcccaacgtctgggttatgacgaattcctcggcaaaggcaccctcaccgtttctgaaatcttcttcacatccccaagccgttgcgctgtagcagatagctgcgccgtctctattgaccgccgtctgacctggggcgaaacctgggaaggcgcgctggacgaaatccgcgccctgcctgcagtacagaaagctaacgcggttgtttctatgtacaactacgaccgtccgtcctggactggcctggtttacccaaccgaatgctacttcccgacctggaaagtggaagaagatcacttcaccgttaaagcactggtgaatgcctacgaagggctgtttggcaaagcgccggttgttgataagtggaccttctcaactaacggcgtatctatcatgggccgtcacggcattccggtgatcggctttggcccgggtaaagaacctgaagcgcatgcacctaacgaaaaaacctggaaatctcacctggtgacctgtgccgcgatgtacgctgcaatcccgttaagctggctggcaaccgaataattactcttcacttattcccctccggttcgccggagggtttttggagtttgctatgcgcgtattgatcaaaaacggcactgtcgttaacgcagatggacaagccaaacaggatttgctgattgaaagcgggattgttcgccagttgggcaacaatatttcgccgcagctcccgtatgaagaaattgatgccactggctgttacgttttccctggcggcgtggatgtccatacgcatttcaatattgatgtcggcatcgcgcgcagttgtgatgatttttttaccggtacccnnnnagctgcgtgtggcggtacaacaaccattattgaccatatgggatttggcccaaacggctgtcggttacgccatcaactggaggtttatcgtggttatgccgcccataaagcggtcatcgattacagctttcacggtgtgatccagcacattaatcacgccatcctcgacgaaatcccgatgatggtcgaggaagggctgagcagttttaaactctatttaacctatcaatacaaactcaacgatgacgaggttttgcaggcattacgccgtctgcatgaatccggcgcgctgaccaccgtgcacccggaaaatgatgcggctatcgccagcaagcgggcggaatttatcgccgcagggttaaccgcgccgcgctatcatgccttgagtcgccctctggaatgcgaagcggaagccatcgcccgcatgattaacctggcacaaattgccggtaacgccccgctctatatcgtgcacctgtctaacggcttaggtctggattatctgcgtcttgcccgtgcgaatcaccagccagtctgggttgaaacctgcccacaatatctcctgttggacgaacgcagttacgatacagaagacggcatgaagttcattcttagcccaccgctgcgtaacgtacgcgagcaggacaaactgtggtgtggcatcagcgatggtgcgattgacgtggtggcgaccgatcactgcaccttctcgatggctcaacgcctgcaaatttctaaaggcgatttcagtcgctgcccaaatggcttacccggtgtggaaaaccgcatgcagttactgttttccagtggcgtgatgacgggacgtataacaccggaacgctttgttgaattaaccagcgcaatgcccgccaggctgtttggcctgtggccgcaaaaaggattattagcgcccggttccgatggcgacgtggtgattatcgacccacgtcagagccaacaaattcagcatcgccatctccacgacaacgccgactactcgccatgggagggttttacctgtcagggcgcgattgtcagaaccttatcccgtggtgaaacgattttctgtgacggcacctttacaggcaaagccgggcgaggtcgtttcctgcgacgcaaaccgtttgtccctcccgtgctctaaccactgccagggatctatacacaatcaagaatgatgagtgaggaaaaatgagtaagaaaattgttctcgccctgggcgggaatgcgctgggcgatgacctggccggacaaatgaaagcggtaaaaattacttctcaggcaattgttgatttaattgcccagggacatgaagttatcgtcactcatggtaacgggccgcaggtgggcatgattaaccaggcctttgaagctgccgcaaaaactgaagcgcattcgccaatgctgccgatgtctgtctgtgttgccttaagccagggttatattggttacgatctacaaaacgccttaagagaagaactgctttctcggggcattaataaacctgtagtaacgctggttactcaggtcgaagtcgacgctaacgatccggcattcctcaacccgaccaagccgatcggttcgttctttaccgagcaagaagcagagcaactgacaaaacagggttacactctgaaagaagatgctggtcgcggctatcgccgtgttgttgcctcgccaaaaccggttgatatcattgaaaaagagacggtaaaagcgctggtagaagcaggccaggtggtgatcaccgttggcggtggtggtattcctgttattcgtgaaggtaaccatctgcgtggtgccagcgcggttatcgataaagactgggccagcgcccgtttagcagaaatgattgatgccgatatgctgatcattctgactgcggtagaaaaagtggccattaacttcggtaaagagaatgaacagtggctcgatcgcctgtcattaagtgatgctgaacgctttatcgaagaaggtcattttgcgaaaggttctatgctgcctaaagtggaagctgccgcctcgtttgctcgctctcgcgcaggtcgtgaagcactgattaccgtattgagcaaagcgaaagaagggattgaaggcaaaaccggaacggtgatttgtcagtaattttaaggccgggtgggtaataccatccggccattttcatttaagccacttccagcacttcttttgtcgctttcacgccctgatgcatcaacatcattaacgcctcaagtacgccgccgccaatcgcccgggctttatcagaaacgctggtgaaatcagcggtttcaccacgaggatcgatatcaccaattttaaaaccaccaaccactgccaggccgtcgttcaacaagccacgcaccatccccgtcaacggtgctttaatttcatgctcaccaatccaggcaatcacatcgccctctttcaccagatcgcctaatttcacgttggatcgcataatgcctgcagcaggagcacggatcacccgtcgggtggtatgccccataatattgccaggaacaccggtattctcctgcgcacaaccacagtaaatcacctgaccgagccagtgcccgcgatttgtttcaattaccgcatgacaatccttccctgcagcaaagcccggcccaagcgcgattgttactggtgccatatctgcccgtgttcccaaattctgtttcgccagaatagcgtccaccacgcaaagcggtttcagttcatcaagcaatgaacaggcgggatctaccatcacagggatgaatccgcgttcggtaagtttcatcgcttccgcagagctggttgccaggcgagcagtgacgccttcgaccgtcatttcgccatcgaacacggcctgggcaaacgccacggtacaacgaatcactgtcggtttttccacttccagcatgatcactttaaaacccgcatgatacagacgtagcgccacaccactggcgatatctcccgcaccgcgaatcaccaccagctggtgtccggaaggatgagaaggtttcatcatcagcccacccggcgcgttatttttcacctgtaatatttctgccagcacgctgatggcgatctcctgcggcgtttccgcacctatgttgtaaccaacgggcgcatgtaaacgggcaatatgttcttcagccacgcctttctcacgcaattgacgcaggaaaagctgaaccttgcgacgacttgccagcaaccccaaccatgcaatgggctgttcaatgagtttgtcgagggcttcacgatcctgattattcgtggcaatcaggacaaaattatcagggcgaatatccagtgcttccactgccgcaccaaacgactcagcatggagaagcgtggttgatggagggaatagttcaggattgaggctttcgcgataaatatcggcaacggcaatatcaaatcctaatagcgccgcactctgggctatcgcccggttgacatgccccgcgccaatcaacaccagacgtggacgcataccatggacgctgataaacactgacatcgcacctccacaatctgacccgacagcatccgcaccgttacgagccatacgtccatggaataatcgcggcttacgttcctgcaatgcctgaagcgantcttcaatcaccttccgctcaaccattccgccaccaattgtaccgacgatagagccatcggcgcgcactaacatttgtgcagaatggcggggagtcgagcctcggctatcaataatttgcgccatagcaaacggacaattttgctcttcgagttttgcagcctctgtgaaaatattcataccaacctcaatggatatcctttcagtaacccggaatacccgggccgctaattcacaaatctgcgcgcgattgcaggatgttcttgtatatcgcccagccagattgcctctacgtcgtgttgttgcagcggttgaaggagctcgctttgcgcaatcgcattctcacattgagaaaaacggttaatgaaccagactcgccgacaaccttgcggtacgtttttaaacgccccctgagggtggcgaaccagcgcaacgagatcgctcagttgcaaggttgcatcaggtgttaacccggtaatatcagcaaactgcgaccagcgatggacattttccgtgctcactttcgcgcccaaaatatgtcctcccatcacagcaatcacgcagcaactgcttttgggtatgcaagattcgtgctcatcaggcgcttttaacggcattgcacgcgagccatctgcttcaatgagaattacgtcacactctggtcgttgcaccagtgcatcaatcgcttctggcgtaaatccctgcacttttcccaggttcgctttccagctgtgaaaacaaaatgaaatgggggatgtaagagacgcatgaggaagcatggcgggatcacgacagaaaaccacgggccagtgagacgttggcataaacatatgtgttgtcgtcgtgattaacacacgcctgccgctagcctggagcagttctgccagccaaaaaagcaagctggttttccccccagcaccaacaacagaaatcacagtgggacgtttctgcgcacctaaatcaatgaataatgccgatgggtcaactatacttttcacgagtctttatgacctctctgggataaattatccccaacttaatccatcaggaagtaacgcaattatcaggcgttattagcccctataaataatggaaccactatgtcagccatcgactgtataattaccgctgccggattatcatcaagaatggggcaatggaaaatgatgttaccctggcaacaggggacaattcttgatacaagtatcaaaaatgcgttgcagttttgtagccgaattattttagtcaccggctatcgtggtaatgaactgcacgaacgttatgcgaaccagagcaatatcactattatccacaacccagattatgcgcagggtttactaacatcagtaaaggccgcagtacccgcagtgcaaacagaacattgttttctcacccacggtgacatgccaaccctcaccatcgatattttcagaaaaatctggtcgttacgaaatgatggcgcaatactgccactccataatggcatccccggccatccgattttagtgtcaaaaccatgcctgatgcaggcaatcaagcgccccaatatcaccaatatgcgtcaggcactccttatgggagctcattattccgtcgaagtagaaaatgcagaaataattttagatattgatactccggacgactttattacagcgcaaaaaaggtatactnaaatttaaaaaacgtagttaaacgattgcgttcaaatatttaatccctccagcactctttatcataatgataaggaatcactgattttgagaaaagagaaaaagtgatatatgggatggcaataataattttcaggagtgattttaattctcatttancacctgtgagttcattcacaaaaagcccttaagtttcgagccgcctcacatttttttatatttcccgccaaacctggcaagagtgggtgcgattgttgctctatccccctaaaccaccggatttctcaacacc

SEQ ID NO: 1480 - DNA, 39363 bp, Escherichia coli
  Strain O55:H7
  modified_base (1345)..(1345): a, c, g or t
  modified_base (2451)..(2454): a, c, g or t
  modified_base (2457)..(2457): a, c, g or t
  modified_base (4266)..(4266): a, c, g or t
  modified_base (5316)..(5316): a, c, g or t
  modified_base (6082)..(6082): a, c, g or t
  modified_base (6984)..(6984): a, c, g or t
  modified_base (9299)..(9299): a, c, g or t
  modified_base (10727)..(10727): a, c, g or t
  modified_base (14999)..(14999): a, c, g or t
  modified_base (16241)..(16241): a, c, g or t
  modified_base (19606)..(19606): a, c, g or t
  modified_base (20326)..(20326): a, c, g or t
  modified_base (20329)..(20329): a, c, g or t
  modified_base (21733)..(21733): a, c, g or t
  modified_base (22120)..(22120): a, c, g or t
  modified_base (27559)..(27559): a, c, g or t
  modified_base (27588)..(27588): a, c, g or t
  modified_base (28254)..(28254): a, c, g or t
  modified_base (29636)..(29636): a, c, g or t
  modified_base (30581)..(30581): a, c, g or t
  modified_base (31544)..(31544): a, c, g or t
  modified_base (31745)..(31745): a, c, g or t
  modified_base (31827)..(31827): a, c, g or t
  modified_base (33007)..(33010): a, c, g or t
  modified_base (34574)..(34574): a, c, g or t
  modified_base (35313)..(35313): a, c, g or t
  modified_base (39359)..(39359): a, c, g or t
ctcaatgatatctgtataagctaaggagagggttatgggggatattatgcgtcccattccgtttgaggaacttttgacgcgcatatttgatgaataccaacaacaacgctcaatctttggtattcccgagcaacagttttactcacctgtaaaaggtaaaactgttagcgtcttcggtgaaacctgtgccactcccgtcggccctgccgctggcccgcacacgcagctcgcgcaaaatattgtcacttcctggctgactggcggacgtttcatcgaactaaaaaccgtccaaattcttgaccgcctggagctggaaaagccctgtattgatgccgaagacgagtgctttaacaccgaatggtctaccgaatttaccctgcttaaagcctgggatgaatacctcaaagcctggtttgccctgcaccttctcgaagcgatgttccaaccttctgattccggtaaatcgttcatctttaatatgagcgtcggttacaacctcgaaggtattaagcaaccgccaatgcaacagttcatcgacaatatgatggacgcatctgaccatccgaaattcgcgcaatatcgcgatacgctgaataaattactccaggatgacgcatttttagcccgccacggattgcaggaaaaacgcgaaagcttgcaagccttacccgctcgcatccccaccagtatggtgcatggcgtcaccctctccaccatgcacggctgtcctccgcatgaaatcgaagccatttgccgctacatgctggaagaaaaagggctcaacacctttgtgaaacttaacccgaccttactggggtacgcgcgtgttcgtgagatcctcgatgtctgcggtttcggttacataggcttaaaagaagagtcatttgatcacgacctcaagctgacgcaagcactggaaatgctggaacgcctgatggcactggcaaaagaaaaatcactcggctttggcgtaaaactgactaacactctcggcaccatcaacaataaaggcgcactgcctggtgaagagatgtatatgtcaggccgtgcgctgttcccgctctccatcaatgttgcagcagttctctctcgcgcctttgacggcaaactgcccatttcttattccggtggtgccagtcagctgactatccgcgatatttttgatacaggtattcgccctattactatggcaaccgacctgctgaaacctggcggctatttgcgcttaagtgcctgcatgcgcgagctggaaggctccgacgcctggggacttgaccatgttgacgtcgaacgactgaacagactggcagcagatgcgttaaccatggaatacacccagaaacantggaagccagaagagcgtattgaagtggcagaagacctgccgctgaccgactgctacgttgccccctgtgttactgcctgcgctatcaagcaagatattccggaatacatccgtctgcttggcgaacaccgctatgccgacgcgctggaactcatctaccaacgcaacgctctgcccgccattaccggtcatatttgcgatcaccagtgccaatacaactgtacccgcctggattacgacagtgcgctgaatatccgcgaactgaaaaaagtcgcgctggaaaaaggttgggatgaatataagcaacgctggcacaaaccagccggttctggttcacgccatccggttgccgtgattggtgcaggtccggcgggtctggcagcaggttacttccttgccagagcgggccatccggttacgctgtttgaacgcgaagccaatgcgggcggcgtggtgaaaaatatcattcctcagttccgaattccggctgagttaattcagcacgatatcgattttgttgccgctcacggcgtgaaatttgagtatggctgctcacccgatttaaccgttgagcagttaaaaaatcaggacttccactatgttctgattgccaccggcacagataaaaatagcggtgtgaaactggcgggcgacaaccaaaatgtcttgaaatcactccccttcctgcgtgaatacaacaagggtacagcgctcaagctgggcaaacatgtggtcgttgtcggggcgggtaacaccgcaatggactgcgctcgtgcggcgttacgcgttccaggcgtagaaaaagcaacggtcgtttaccgtcgttcactgcaagagatgcccgcatggcgcgaagagtatgaagaagcgttgcacgacggcgtggagttccgtttcctgaataatccggaacgtttcgatgctgatggcaccttaaccttgcgcgttatgtcgcttggcgaacccgatgagaaaggtcgtcgtcgtccggttgaaaccaacgaaacagtaacactgcatgtagacagcctgatcaccgccattggtgaacagcaggatactgaagccctgaatgcgatgggcgtgccgctggacaaaaacggctnnnnagncgtcgaccataatggcgaaactcgtctgactgacgtctttatgatcggcgacgtacagcgcggaccatcctccattgtcgctgctgtcggaaccgcgcgtcgggcgaccgatgccatccttagtcgggaaaatatccgttcccaccagaacgataaatactggaacaacgtcaatccggcggaaatctatcaacgtaaaggcgatatctctatcacgctggtgaacagtgacgatcgtgatgcgtttgtcgcgcaggaagctgctcgctgccttgaatgtaactacgtttgcagcaagtgtgtggatgtctgcccgaaccgcgccaacgtctccattgcggtcccaggcttccagaatagattccagacgctgcacctcgacgcttactgtaacgaatgcggcaactgcgctcagttctgtccgtggaacggtaaaccatacaaagacaaaatcaccgttttcagcctggcgcaagactttgataacagcagcaacccaggcttccttgtggaagattgccgggtacgagtacgactgaataaccaaagctgggtgttaaacatcgacagcgaaggtcagttcaacaacgtaccaccggagctgaacgatatgtgccgcatcatcagccatgtccaccagcatcatcattatctgctgggccgcgtggaggtgtaatcatgttgattctgaagaatgtcaccgcagtgcagttacacccggcgaaagtgcaggaaggcgttgatatcgctatcgaaaatgatgtgattgtcgctatcggcgatgccctgacgcaacgctaccccgatgccagctacaaagagatgcatggtcggattgtgatgccgggaattgtctgctcgcacaaccatttttactcggggctttcccgcggaattatggcaaacatcgccccctgcccagatttcatctcaacgctgaaaaatctctggtggcggctcgatcgcgcccttgatgaagagtcgctctattacagcgggctgatttgttccctggaagcgattaagagcggatgtacatcggttatcgatcaccatgcctctccggcgtatatcggcgggtcgctctccacattgcgcgacgcatttttaaaagttggcctgcgcgcgatgacctgttttgaaactactgaccgtaacaacggcatcaaagagttgcaggaaggtgtagaagaaaacatccgcttcgcccgtcagattgatgaggcgaagaaagcagcaaccgagccgtatctggtggaagcacatatcggtgctcacgcgccgtttaccgtgccagatgccggtctggagatgctacgtgaagccgtgaacgccacaggccgtggtttgcatattcacgctgcggaagacctttacgacgtttcctacagtcaccactggtacggcaaagacctgctggcacgactggcgcaattcgatctcatcgatagcaaaacgctggtcgctcatgggctgtacttgtcgaaagatgacatcgccctactcaatcagcgcgatgcgttcctggtgcataacgcccgttcaaacatgaacaaccatgtcggctacaaccatcaccttagcgacatccgcaatctggcgttgggaacggacggcattggttcggacatgtttgaagagatgaaatttgccttctttaaacatcgcgatgcgggtggtccgctgtggcctgacagttttgccaaagccctgactaacggtaacgaactgatgagccgcaactttggcgcgaaatttgggcttctggaagccggttacaaagctgatttaaccatttgcgattacaantcgccgacgccgctgctggcagacaatatcgccgggcatatcgctttcggtatgggctcaggcagcgttcacagcgtgatggtcaatggtgtgatggtctatgaagaccgtcagtttaacttcgattgcgattccatttatgcacaagccagaaaagccgctgccagtatgtggcgtcggatggatgcgctggcataaatgacagatgccctcttcccgcaggaagagggttaaataaggaaagaagatgattgaacaatttttcaggcccgactctgtcgaacaggcgctggaactgaagcaccgctaccaggatgaagccgtctggttcgccgggggcagcaaactcaatgctacaccaacccgtaccgataaaaagattgccatttccttacaggatctggaactggactgggttgactgggataacggtgcactgcggattggcgcaatgtctcgcttgcagccactgcgtgatgcgcgatttattcctgcagcactgcgtgaagccctcggttttgtttactcacgccatgttcgtaatcagtcgaccattggtggtgaaatcgccgcccggcaggaagagtcagtgctgcttcccgtcctgctggcactggatgctgaactggtttttggcaacggcgaaacgctgtcaatcgaggactacctggcctgcccatgcgatcgcctgctaaccgaaattatcattaaagatccgtatcgcacctgtgcgacccgcaaaattagccgttctcaggcaggtttaaccgtcgtgacggcagccgttgcaatgacagaccacgacggtatgcgaattgcgctggatggcgtcgccagtaaagcactgcgtctgcatgatgtcgaaaaacaaaatctggaaggcaatgcacttgaacaggctgtcgccaacgccattttcccgcaggaagatttgcggggcagcgtggcctataaacgctatatcacgggagttctggtagccgacctgtatgccgactgccaacaggctggggaggaagccgtatgatcatccactttactttaaatggngcgcctcaggagctaaccgttaatccaggcgaaaacgtgcaaaagctgttgtttaacatgggaatgcactctgtacgcaacagtgatgatggtttcgggtttgccggttctgacgcaatcatctttaacggtaatatcgttaacgcgtccttgcttattgccgcacagttagagaaggcagatattcgtaccgcagaatctctgggcaaatggaacgagttaagtctggttcaacaggcaatggttgatgttggcgtggtgcagtctggttataacgatccagctgcagctctgattatcaccgatcttctcgatcgcatcgccgcacctacccgcgaagagatcgacgacgcgctttctggtttgttcagccgcgatgctggctggcagcaatactatcaggtcattgaactggcggttgcacgtaaaaataatccgcaggccaccattgatatcgctccgactttccgtgacgaccttgaagtcattggcaagcattatcctaaaactgatgccgcgaaaatggtgcaggcgaaaccctgctatgttgaagaccgcgtaacggctgacgcctgcgtcattaaaatgttacgtagcccacacgctcacgcactgattactcatctggatgtcagcaaagctgaagccttaccgggcgtcgttcacgttattactcacctgaattgccctgatatctactataccccggggggtcagagcgcaccggaaccgtcaccgcttgaccgccgtatgttcggcaaaaaantgcgtcacgtcggcgatcgcgttgctgcggtggtcgctgaaagtgaagaaattgcgctcgaagcattgaaactcatcgaggttgaatatgaagtgcttaagccggtaatgtcgatcgacgaagcaatggcggaagatgcgcctgtcgtgcacgatgaaccggtggtgtatgttgctggtgcgccagatactctggaagacgataacagccatgcagcccagcgcggcgagcatatgatcatcaacttcccgatcggttctcgccctcgcaaaaatatcgccgctagtattcatggtcatattggcgatatggacaaaggctttgccgatgccgatgtgatcattgagcgaacctataactcaacgcaggcgcagcagtgcccgactgaaacacatatctgctttacccggatggacggcgatcgtctggttatccacgcctccacccaggtaccatggcacttacgccgccaggtcgcgcgcctcgtggacatgaaacagcataaagttcatgtcattaaagagcgagttggcggcggttttggttccaaacaggacatcctgctggaagaagtgtgcgcctgggcaacctgcgtgaccgggcgtccggtactgttccgctacacccgtgaagaagagtttattgctaacacctctcgtcacgtcgcgaaagtcaccgtcaaactgggagcgaaaaaagatggtcgcctgacggcagtgaagatggatttccgcgccaacactggcccttacggcaaccactcactcaccgtaccgtgtaacggaccggcgctgtcgctgccgttatatccgtgcgataacgtcgatttccaggtcaccacctactacagcaacatttgcccaaatggtgcttatcagggttatggcgcaccgaaaggtaanttcgctatcaccatggcattagcggaactggctgaacagttacagatcgaccaactggaaattatcgaacgtaaccgggtacacgaagggcaagagctgaaaattctcggtgcaatcggtgaaggtaaagcgccgacctccgttccttccgccgccagctgcgcactggaagagatcctgcgtcaggggcgcgagatgatccaatggtcttcaccaaaaccacaaaatggtgactggcacatcggtcgtggtgtcgccattatcatgcagaaatcagggatcccggatatcgatcaggctaactgcatgatcaaactggaatcagacggtacctttatcgttcattctggcggtgcggatattggtactggtctggataccgtggtgacgaaactggcagcagaagtgctgcactgcccaccgcaggacgtgcatgttatctccggtgataccgatcatgcgttgtttgataaaggcgcatatgcctcgtccggtacttgcttctcgggtaacgcggcgcgtttggcagcggaaaatctgcgggagaaaattctgttccacggcgcgcaaatgttgggtgagccagtggcagatgttcaactagcaacgccgggcgtcgtgcgcggcaagaaaggcgaagttagtttcggggatattgcccataaaggcgaaaccggcaccggctttggttcactggtgggaactggcagttatatcacgcctgatttcgccttcccgtatggcgcaaacttcgctgaagttgccgtcaacacgcgtacgggtgaaatccgcctggataaattctacgccttgctggactgcggtacaccggtcaatccagagttagcgttgggacaaatctacggtgctaccctgcgagctatcggccacagtatgagcgaagagatcatttatgacgccgaaggtcacccgttaacgcgtgatttacgcagctacggcgcaccgaaaattggtgacattccgcgtgatttccgcgcagtgctggtgccgagcgacgataaagtcggcccgttcggggcgaaatcgatctcggaaatcggtgtaaatggcgcagctccggcgattgctaccgcaattcacgatgcatgcggcatctggttacgcgaatggcatttcacaccggagaaaatactcaccgcgctggaaaagatataaataataaatggccgcttcggcggcctgtttctctgtttggacgatgactaaatagtgactgcgaaaatgagataagccgttctcaaggcgtcctgcgccccaaattcgtgggaatttattttactaattcagatgatcaaatttactttaaaaggagtgaagggatgtctgatataaaccatgcaggttctgaccttatatttgaactggaggatcgccctccctttcatcaggctctcgttggtgccattacccatctgttggcaattttcgttccgatggtaacccccgcgttaatcgtgggggcggccttacagctttccgctgaaacaactgcctatcttgtttcaatggcgatgatcgcctctggtattggtacctggttacaagtaaaccgctatggcatcgtcggttctggcctactctcaattcagtcagtcaatttttcatttgttacggtcatgattgcgctgggcagcagcatgaaaagcgacggttttcacgaagagttaatcatgtcgtcgctcctcggcgtctccttcgttggcgcatttctggttgtcggatcttcatttatcttgccctatttacgtcgggttattacgcctactgtcagcggtattgtggtactgatgatcggcttaagcctgattaaagtcggcattatcgattttggtggaggatttgctgccaaaagcagcggtaccttcggcaattacgaacatctcggcgttggtttattggttttgattgtggtgatcggctttaactgctgtcgcagtccgttgctacgcatgggagggatcgccattgggctatgcgtcggttatatcgcgtcgttatgcctgggcatggtggatttcagcagtatgcgcaatttgccgttaatcaccatcccacatccgttcaaatacggctttagttttagcttccatcagttcctggtggttggcacgatttatctgcttagcgtgctggaagctgtcggcgatatcaccgccacggcaatggtttcccgccgacccattcagggagaagagtatcagtcccgactgaaaggcggcgtgctggcagacggtctggtttctgttatcgcctccgctgtcgggtcattacccttaaccacgtttgcgcaaaanaatggggttattcagatgactggcgtcgcttcacgttatgtcgggcgaaccatcgcggtaatgctggttatcctcggtttgtttccgatgattggcggcttcttcacgaccattccctcggcagttctgggaggcgcaatgacgttgatgttttccatgattgccatcgctgggattcgcatcatcatcaccaacggtttaaagcgccgagaaacacttattgtcgccacttctttaggtttaggacttggcgtctcctacgatcccgaaatttttaaaatattgccagcctctatttatgtattagttgaaaaccctatttgtgctggcgggttaactgcgattttattaaatattatcctccctagtggctaccgacaggaaaacgttctgcctggtattacctcagcggaagagatggattaacagtaaaggagtcaatgatgtcaggagaacacacgttaaaagcggtacgaggcagttttattgatgtcacccgtacggtcgataacccggaagagattgcctctgcgctgcggtttattgaggatggtttattactcattaaacagggaaaagtggaatggtttggcgaatgggaagacggaaagcatcaaattcctgacactattcgcgtgcgcgactatcgcggcaaactgatagtaccgggctttgtcgatacacatatccattatccgcaaagtgaaatggtgggggcctatggggaacaattgctggagtggttgaataaacacaccttccctactgaacgtcgttatgaggatttagagtacgcccgcgaaatgtcggcgttcttcatcaagcagcttttacgtaacggaaccaccacggcgctggtgtttggcactgttcatccgcaatccgttgatgcgctgtttgaagccgccagtcatatcaatatgcgtatgattgccggtaaggtgatgatggaccgcaacgcaccggattatctgctagacactgccgaaagcagctatcaccaaagcaaagaactgattgaacgctggcacaaaaatggtcgtctgctatatgcgattacgccacgcttcgcccctacttcttctcctgaacagatggcgatggcgcaacgcctgaaagaggaatatccggatacgtgggtacatacccatctctgtgaaaacaaagatgaaattgcctgggtgaaatcgctttatcctgaccatgatggttatctggatgtttaccatcagtacggcctgaccggtaaaaactgtgtctttgctcactgcgtccatctcaaagaaaaagagtgggatcgtctcagcgaaaccaaatccagcattgctttctgtccgacctccaacctttacctcggcagcgggttattcaacttgaaaaaagcatggcagaagaaagttaaagtgggcatgggaacggatatcggtnccggaaccactttcaacatgctgcaaacgctgaacgaagcctacaaagtgttgcaattacaaggctatcgcctctcggcatatgaagcgttttacctggccacgctcggcggagcgaaatctctgggccttgacgatttgattggcaactttttacctggcaaagaggctgatttcgtggtgatggaacccaccgccactccgctacagcagctgcgctatgacaactctgtttctttagtcgacaaattgttcgtgatgatgacgttgggcgatgaccgttcgatctaccgcacctacgttgatggtcgtctggtgtacgaacgcaactaataataaaacttttacatcctcgtgaggacatcattatgtctggagacatcctacaaacaccggacgcaccaaagccacagggcgcgctggataattattttaaaattaccgctcgtggcagtaccgttcgtcaggaagtactggctggcttaacgacctttctggccatggtttattccgttatcgtcgttccgggaatgctgggcaaagcaggttttcctcccgcagctgtgtttgttgccacctgtctggtcgcgggcttcggctcgttgctgatggggttatgggctaatttgccaatggcgattggttgcgcgatttccttgacggcgtttaccgcattcagtctggtactcgggcaacaaattagcgttcctgtcgcactgggcgcggtatttctgatgggcgtcatcttcaccgccatttccgtaaccggtgtgcgtacctggatcttacgtaatttgccgatgggtatcgctcacggtacaggtatcggtatcgggctgtttctgctgctgattgctgctaacggtgtgggtatggttatcaaaaacccgattgaaggcttgccagtggcgctcggtgcgtttacctccttcccggtgatgatgagcttgctggggctggcggtcatcttcggtctggagaagtgtcgcgtacccggcggtatcttgttggtgattattgcaatttcgatcatcggcttaatctttgacccagcggtgaaataccacggtctggtggcgatgccaagcctgactggcgaagatggtaagtctctgattttcagcctcgatattatgggcgcactccagccaactgtacttccgagtgtactggcattggtgatgaccgcagtgttcgacgctactggcaccatccgtgccgtcgccggtcaggcgaatttgttggataaagacaaccagatcatcaacggcggcaaagccctgaccagtgactcagtaagttcaatattctccggcctggtgggcgcagcgcccgcagcggtttatatcgaatcagcggcaggaaccgccgccgggggtaaaacagggttaaccgcaaccgtagtgggggcgttattcctgctgattctgttcttatcaccgctgtcatttttgatccctggttacgccactgcacccgctctgatgtacgtaggtttgctgatgttaagtaacgtctcgaagctggatttcaatgattttattgacgctatggctggcctggtgtgtgccgtgttcatcgttctgacttgtaatatcgttaccggtattatgctgggctttgtgacactggtcgtaggccgcgtctttgcacgcgaatggcaaaagctgaatattggtacggtgatcattactgccgcactggtcgcattttacgcgggtggttgggcaatctaatagattctccgcgcctttcagcgcggagatttctttcacagaggattctcaccgctggcaacaatacgctgctggcggactcgcctgagttctctttcagtaagcaactgcagcgcctgtgttgggcaagattcaacgcaggcaggcccctcttcccgctgttcacagagatcgcatttcacgatttgttgccgggtatcccccggcaacgactgaatggtgatcattccaaacgggcacgcactgacgcaactctgacagccaatacaacgggcagaattggtctgcaccacctgctcgcccatcgtcagcgcccccacggggcaagcgccaacacaaggggcgttttcacactgatggcacatcaccggcgcactgatgcagtccagtcgctgtaccttcagccggggtaaaaagatatcggcattcaactcctgttctgaagggtgagcgaccacacaggccacttcacaagtacggcagccaatacagtcagccggattaacgataattaacgatttcatcacgatgccttcgtatcaaacagagttaacatatcgcgcgccgcctgccttcctgcggccattgcagtgacaaccagatccgcgccatggactgcatcaccaccagcaaagacttttttcagatgcgtctgggtaggtaaatacccgacgtcaccggtttgaatcaggccccatttatcgagtttaattccgctgccctgcaaccacggcatggcatgcgcctggaaaccaaaggccataatgagaacatcggcgggcaattcaaactctgaacccgcaaccggacgaggacgacggcgaccatccggccccggctcacccatggcggtacgaatcaggcccaccgcagttaaacgcccatcttcgtcacaagcgatatattgcggctgaacattgaattgaaactcgacaccttcctcgcgcgcattgaccacctctttgcgcgagcccggcatactgacttcatcacgacgatacgcgcaggtcacgctggcagcattgaggcgaatggaagtccgcaaacaatccattgtcgtatcgccaccgcccaataccacgactcgcttaccttccacgtccgtcagcggatactcttcagactccggcaatcccatgagctggcgggtatgggcagtcaggaacggtagagcctgaatgacaccgggcgcatcttcatgcggcagatctgctcgcatcatcccgtaagtccccacgccgatgaaaactgcatcatattcagaagttaaatcgctaaaggtaatatcgcggccaatttcacagttaagatgaaagtcgattcccattgcggtgaatatctctcgccgctggcttaataccgttttatcgagtttgaaaggaggaatgccaaaagtcagcataccgccaatttctggatggcgatcaaagacatcgacctgaactcctgcgcgcgccagaatatcagcacaccctaaccctgcaggcccagcgccaatcaccgccactttctcgatacggggaacaactttgctgacatcgggacgccagcccatcgccagcgcggtatcggtgatgtagcgttccagattaccgatagagactgcgccagagtgatctttcaaagtacatgcgccttcacaaagacggtcctgtggacataccctgccgcagatttctggtaaggaactggtctggtggcaaagttctgccgcttcaataatctttccctcctgtaccagacggatgtaatccggaatagcgttatgcagcgggcaatgccagttgcagttagctttttcggcacaataaacacagcggtcactctcataagtcgcttgttgtggatccagcccgcaatagatttcgccaaagtggtttttccgttcacttgctgaaattttatctgcgcctttacgcgagttaacggggagcaacgctgcactgcgagatggctgagcgtctgatgacgcttttcctgctgccgttttgcgctggcgggccacctttatctgctgtaaccctttatcgtccatcagtcgtaacgcctgtgttgggcaaacttcaatacaggcttgcgtgccggaactgcgctggttacaaaggtcgcatttctgcgcaatcgtatcgaccatctcaacgacgccaaaggggcaagcgattgcgcatcttttacaaccaatacatttttgctcgtccagttgtacgctatcggactggaaagtcagagcattaaccggacaagccgtaacgcaaggggcattgttgcagtgatggcaggccaccggattcgcagccaggcctttccctacaacgtggatacgtggtcgaaagtcactgtgactcagcggccagttttcttgattgtgtgccaccgcacaggcaatttcacaagcatgacagcctatacattccgcggcttcagcagcgataaacttattcatttgcatccctttcatttaatgagttatgtcttctcaaatttcgcgatgcaataaacgggcatatattaggtagcatgaccgttttaattataantttgcgactgagttcaaattattgcccctcaatctatgccgctttcattatttcaacattgccgccccaaatagcgctatccagataaaaacgattaaatgcgagagtgcgacatgccagaatgattaatgaaatatcaatatgagaaaattacagataattccattgtcaggttctcttgtcattttcgtggtttaagcacgattatgtgattgcctccgcaattcctgtctctaactccccttcctcgcaaaaactggcactccacgagcatgtgtttagacagtttcattaacgtaaacggttgctttttactctggcgggcgaaaggagaaacactgatgagcgccatagattcccaacttccctcatcttctgggcaagaccgcccaactgatgaggttgaccgcatattatcaccaggaaagctgatcatactcggtctgcaacacgtccttgtcatgtacgcaggtgcagtcgctgttcctcttatgattggtgaccgactgggcctctcaaaagaagctattgcgatgctcattagctcggatctcttttgctgcgggatcgtcacattattgcaatgtatcggtatcggccgctttatggggatccgcctgccggtgattatgtcggtgacctttgctgctgtaacaccaatgatagccattgggatgaacccggatatcggcctgctgggtatatttggtgccactatcgccgcgggttttatcaccacattattagcgccacttatcggtcgcttgatgcctttattcccgccactggttaccggtgtggttattacttctatcgggcttagcatcattcaggtgggtattgactgggccgccggaggtaaagggaatccgcaatatggtaatcccgtttatttaggtatctcctttgccgtcttaatttttatcttgctcattactcgctatgcgaaaggatttatgtccaacgtcgccgtattactggggattgtatttggctttttactttcgtggatgatgaatgaagtcaatttatccgggctacatgatgcctcgtggtttgcgattgtcaccccgatgtcgtttggtatgccgattttcgatcccgtttccattctgaccatgactgccgtgttaatcatcgtgtttatcgagtcgatggggatgttcctggcactgggtgaaatagtcggtcgtaaactctcttcgcacgatattattcgcgggctgcgtgtcgatggcgtanggacaatgattggtggcacgtttaacagcttcccccacacgtcattttctcaaaacgttggcctggttagcgtgacgcgcgttcatagccgctgggtgtgtatttcttcgggaattatattaatcctgtttggcatggtgccaaaaatggcggtgctggtagcctccattccgcaatttgtgctgggcggcgctggtctggtgatgttcggcatggtactggcgacagggattcgaattctgtcgcgctgtaactacaccaccaaccgttacaacctctatattgtggcgatcagtctcggcgttggcatgactccaacgctctctcacgatttcttttctaagttaccggccgtactgcaaccgctgctacatagcggcattatgctcgcaacccttagcgccgttgtgctgaacgtcttctttaatggctatcagcatcatgctgacctggtgaaggaatccgtctctgataaagatttaaaagtcaggacagtacgtatgtggcttctgatgcgcaagctgaagaaaaatgagcatggagaataatatgaattttttaatgcgcgctatattcagtctgctgttgctttttactctctctattcctgtcatttctgactgtgttgcaatggccattgaaagtcgcttcaaatatatgatgctacttttttaaatggtttttacctgtcggcatccgctcaaaacgggcggttgtcgataaacgctcacttggttaatcatttcactcttcaattatctataatgatgagtgatcagaattacatgtgagaaattatgcaaacggaacacgtcattttattgaatgcacagggagttcccacgggtacgctggaaaagtatgccgcacacacggcagacacccgcttacatctcgcgttctccagttggctgtttaatgccaaaggacaattattagttacccgccgcgcactgagcaaaaaagcatggcctggcgtgtggactaactcggtttgtgggcacccacaactgggagaaagcaacgaagacgcggtgatccgccgttgccgttatgagcttggcgtggaaattacgcctcctgaatctatctatcctgactttcgctatcgcgccaccgatccgaatggcattgtggaaaatgaagtgtgtccggtatttgccgcacgcaccaccagtgcgttacagatcaacgatgatgaagtgatggattatcaatggtgtgatttagcagatgtattacacggtattgatgccacgccgtgggcgttcagtccgtggatggtgatgcaggcagccaatagtgaagcaagaaaattgttgtctgctttcgcgcagcacaattaaaaaaccccgacatctgccggggttatgcgcataacgtaatgcttatttcaccggacgcatcgccgggaacagaataacgtcgcggatggtatggctgttggtgaacagcattaccatacggtcgataccaatccccagacctgctgtcggcggtaagccatgttccagtgcggtgacgtaatcttcgtcgtagaacatcgcttcgtcgtcacctgcatctttcgcggcaacctgatccaggaagcgttgcgcctgatcttccgcatcattcagctcgctaaagccgttaccgatttcacgaccaccaatgaagaactcaaagcggtctgtgatttccgggttaacgtcgttacgacgcgccagcggagaaacttctgccggatattcagtaatgaaggtcggctgaatcagatgtgcttctgccacttcttcgaagatctcggtaacgatacggcccagaccccagctcttctcaacgtggataccgatagattcagcaatcgcttttgcagagtcgaagttgtccagatccgccatgtcggtttccgggcgatatttcttaatcgcttcacgcatggtcagtttttcgaacggtttaccgaaatccagcgtcacgtcgccgtaggtcacttccgtcttaccgagaatatcctgtgccagagtacggaacagcgattcggtcagctcgatcagatctttgtaatctgcgtaagccatatagagttccatcatggtgaactctgggttatgacgtacggaaataccttcgttacggaagttacggttgatttcgaatacacgctcgaagccaccaaccaccagacgcttgaggtacagttccggcgcgatacgcaggtacatgtcgagatccagcgcgttatggtgggtgataaacggacgcgcagcggcaccgccagggatcacctgcatcatcggcgtttcaacttccataaagccgcggttcaccatgaactggcgaataccagagaggatctgcgagcgcactttaaaggtgttgcgggattcatcgttggagatgagatcgagataacgctgacgatagcgcgcttcctgatcctgcaagccgtggaatttatccggcagcggacgcagtgctttggtcagcagacgcaactcggtacagtggatagacagttcgccggttttggttttgaacagtttacctttcgcgccgaggatgtcgccgaggtcccattttttgaactgctcgttgtaaacgccttccggaagatcgtcacgggcaacgtacagctgaatacgaccgccaacgtcctgcagggtaacaaaagaggctttacccataatacggcgggtcatcatgcggccagcaacggcgacttcgatgttcagcgcttcaagttcttcgttctctttaccgtcgaattctgcgtgcaattggtcagaggtatgatcgcgacggaaatcgttcgggaaggcaattccctgctcacgcaggttcgccagcttctcacgacgcgttttcagttcattgttaagatcgactaccgcgtcagcgccctgtgcgtgttgttcagacatgttggttcctcataaccctgctttcaaacttgcttcgataaattgatccaggctgccgtccagcacggcctgcgtattgcgggtttcaaccccggtgcgcagatctttaatgcgggagtcatcaaggacataagaacgaatctggctgccccagccgatgtcggatttgttatcttccatcgcctgtttctcggcatttttcttctgcatctccagttcataaagcttcgctttcatctgcttcatggcctggtctttgttcttgtgctgggaacggtcgttctggcactgggtcacgatcccggtcgggatgtgggtaatacgcaccgcagattcggtacggttaacgtgctgaccgcccgcgccggacgcgcgataaacgtcaatgcgcagatccgccgggttgatttcgatatcaatatcatcatcaacttccggataaacaaacgcggagctgancgacgtgtggcgacgaccgccggagtcaaacgggctcttacgcaccaggcggtgaacgccagtttctgtacgcagccagccgtaagcgtaatcgccggagattttgatcgtcacggatttaatacccgccacttcaccttccgactcttcgatgatttcagttttgaaaccacgcgattctgcccagcgcaaatacatacgctcaagcatgctcgcccagtcctgtgcttccgtaccgccagaccccgcctgaatatcgaggtagcagtcggcgctgtcatattcgccagagaacatacggcggaactcaagctgcgccagtttttcttccagggcgtcgagttcagcaacggcttcgttaaaggtttcttcgtcgtcagcttctacagccagttccagcagaccagaaacatcttccagcccctgtttcatttggtcgagggtgtcgacaacggcttcgagggaggaacgctctttacccagcgcctgtgcgcgttcgggttcgttccagacatccggctgttccagctcggcgtttacttcttccagacgctctttcttggcgtcgtagtcaaagataccccctaagaacgtcggagcgttccgtgaggtcctgaatgcgattatttaccggattaatttcaaacatggtctgatttcttttattgagctagtcaaaatgcggtgataagagcgggattgtacccaatccacgctctnttntatagagaagatgacgctaaattggccagatattgtcgatgataatttgcaggctgcggttgccgcgaaactcgttgatatcgagcttgtaagccagttgcacttcgcgcacgccgttatccggccagagggcggtatcgacattaaaagcaataccatccagcagcggaccgccgccgaccggttcgaccatgactttcaaatgacgttcgcccaccagccgctgttgcagcagacggaaatgaccatcaaacagcggctccgggaacatctgcccccacgggccagcatcgcgcagcagctgcgccacttccatggtcatttcggccgggcttaacgggccgtctgacaccacttcgccttgcaatagcgaagggtccagccactcggtaaccagctcgccaaaccgttgttgaaagagttcgaatttatcctcttccagcgacaaacccgccgccatcgcatgaccgccaaacttcagcatcataccggggtagagtgtgtctaatcgctccagcgcatcacgcatatgcagcccctgaatggagcgaccggaacctttcagcgtaccatcacctgctggcgcaaaggcgataaccggacggtgaaaacgctctttgatgcgcgaagccagaataccgacaacgccctgatgccattcggggtgatacattgccagcccgccgggtagcgtgtcgcgacttcgctccagtttctcgcacagggtcaaggcttcaatctgcattccttgttcgatctcttttcgcgtctgatttagcgcatcgagttcatttgccagcacgcgcgcttcgccgatgttgtcgcacagcaacagcgccacaccgacggacatatcgtccagtcgcccggcagcattgagacgtggccccagcgcaaaacctaaatcgctggcggcgagtttttgtgcatcacggtttgccacttccagcagcgctttaatccctggacggcactttccggcacggatgcgactcatcccctgccaggtcagaatgcgattattagcgtccagcggcacgacgtccgccactgtccccagcgcgaccagatccagcagttctgccaggttaggaattgcgatgccgcgctcatcaaaccagccctgatcgcgcaaaaaggtgcgcagcgccagcatcagataaaacgccacacccacgcctgccagtgatttcgacgggaaattacagtcgcgcaagttagggttaatgatcgcttccgctgcgggtaatgtgtcgcccggcaaatggtgatcggtaacaataaccgggatgcccaacgagcgagcgtgctcaactcccgcatgggaggaaataccgttatccaccgtgacaattaactgcgcgccacgggcatgggcctgatcgaccacttccgggcttaagncgtaaccgtcttcgaaacggtttggtaccaggtagtcgatattgctgcaaccaagcgagcgcatcgccagcacgcttagagccgtgctggtggcaccgtcggcgtcgaaatcaccgaccacaataatccgcgttccttcgcgaaaagcgttgtaaaggatctcaacggccttttcgacgccgctcagttgctgccagggcagcatacctttaacactgcgttccagttcttgcgcactgcgtactccccggctggcgtataaacggcgcagcaagggaggcaattccgcgggcaagtctgccgtttcatcgacttcacggcgacgaagttgtatctgttgtttcacgcgaattatttaccgctggtcattttttggtgttcgtcgangaattctttcatctctttcggcggctggtaacccggaacaagtgtgccattgctcagcacaactgccggagtaccgctaacgccaagctggacgccaagtgcgtaatggtcggcaatatccacgtcgcagctggctggtgcgacgcttttacctgccatcacatcatcaaacgctttgtttttatctttcgcacaccagatagctttcatttctttctcagcatcgctgtccagcccctggcgtgggaaagcaagataacgcacggtgatccccagcgcgttatagtctgccatttgttcatgcagtttgtggcagtaaccacaggtaatatcagtaaacacggtgatgacgtgtttttcctgcggtgctttataaacgatcatctctttttcaagcgcattcaactgctttaacagcatcttattggtgacattgaccggagccgtgccgctaacgtcatacattggcccctgaatgatatgtttaccatcatcggtgatgtacaacacaccgctgttagtcagcacagtcttcatgccagctacgggcgcgggctgaatatcgctgcttttgatgcccattttggctaatgtttgttgaattgccgcgtcatcagcctgagcgaagcctgaaaacgccgctaacaaagtaaacaacataaaacctttcttcataaatcttcccgttcttttcagacatcacgcccgcgggtgatgctgttgatgaagttgccgcagacgctcggtagcgacatgcgtataaatttgcgtggtggagagatcgctgtggcccagtagcatctgcaccacgcgtaaatccgcaccatgatttaataagtgagtggcaaaagcgtgacgcaacacatgcggtgacagcttttcgctgtcgatacccgccagcacggcataatgtttaatgcggtgccagaaggtctgtcgcgtcatctgctgcgcacgctggctgggaaacaacacgtcaattgacacaccattcagtagccacggacgcccatgttccagataggtttccagccagtaaaccgcctcttcacctaacggcaccaggcgctctttgttgcctttaccaatgacccgcactacgccctgacgcaggctgatatcactcattgtcagcccgaccagttcagagacacgcagcccggtagcatacaacacttcaagcatggctttatcgcgtagctccagtggctgatcaattaatggtgcctgtaataaacgttcgacctgcgcttcgcttaaatcttttggcaaacgctggggcaatttcggtgaagcgagatgcgcactgggatcatcttcacgaaacttttcgcgataaagatactggaacaatcggcgcactgcactcagcaaacgcgctgagctggtggctttatacccgccctccagccgttctgccagtaatgcctgtaaatcgtcactttgcgccgtcgccagcgtcaacccgcggtgatgcaaccactccaccatcattgacagatcgcgacggtaagcgttcaacgtattttcagccagatttttttccagccacagagcatcaagaaactgctcgatgcgtgccagatcctgtttcacttgcgccccttatggtcactcatttgatccattatgccttattgtgccgtgactaaagcgattctgatacactagccgcaaaagccacagcagaatcgagaagcttacgttatgaatatgggtcttttttacggttccagcacctgttacaccgaaatggcggcagaaaaaatccgcgatattatcggcccagaactggtgaccttacataacctcaaggacgactccccgaaattaatggagcagtacgatgtgctcattctgggtatcccgacctgggattttggcgaaatccaggaagactgggaagccgtctgggatcagctcgacgacctgaacctcgaaggtaaaattgttgcgctgtatgggcttggcgatcaactgggatacggcgagtggttcctcgatgcgctcggtatgctgcatgacaaactctcgaccaaaggcgtgaagttcgtcggctactggccaacggaagggtatgaatttaccagcccgaaaccggtgattgctgacgggcaactgttcgtggggctggcgctggacgaaactaaccagtatgaccttagcgacgagcgtattcagagctggtgcgagcaaatcctcaacgaaatggcagagcattacgcctgatatcactgacggcttagcgcatatgctttgccgtcatctttatctttgcgtctcttgttgcaacaaaatccgccgtaaatcccgccattcggcttcgtccatgctgtcggctgccagccataaatgttgccgtttaccgctatcagaacgtaaacgcagcatcatgccgctcttaatcatccacggcgctttgacgatgctccactcctgcccttgccaacgcaaacgcccgtccatcaacaagcgaatttccccctggcgagcattaatacgccgctggctgcgaacgcaatcaaacaccaccagcgaaagtaacaccatccataacggggtgtaactgagcggccagggcatgagtaaaataacagcggcaaccagcccatgaatcagcaaggaaagccactgtgcgcgccaggagacgcgcaaatcagattgccacaggaccacgttcccggttccgtgtctggatgagtcggaccatcatttccagttctgcatcggccggtttaccgtgattcatcagccagttaaacagatcgggatcgtcacattccagcagacgaataaagatgcgtttttcgtcatcgcttaagctgtcatactcatgttcgaaaaacggcatgattgaaatatcgagttcgcgcataccacggcggcatgcccaatgaatgcgggctttgttgttaatgtccatcttcttcctgtctcacgaaaatccagtacccggctattgtaacgtgtttttcgacttcttttacgggaatatcagtaaacacaatcgcgatcgcgaaattaattcacaacaatttaagggcttcattttttgggaagtcgcctcgcagaaggcacagatcgcgtagtgaaagcacttgcattgcctcatagctcttttaccattagttattaatacgccgttaagcaactcaggactctattatggcttttacaccttttcctccccgtcagcctacggcttctgcccgtttgccactgacgctgatgacgcttgatgactgggcgcttgccaccattactggcgcggacagcgaaaaatatttgcagggccaggtgacagcagatgtcagccagatgacagatgatcagcacctgctcgccgcccattgcgacgccaaaggtaaaatgtggagcaatttacgtctgttccgcgacggcgatggctttgcatggattgaacggcgcagcgtgcgtgaaccgcagctggctgaactgaaaaaatatgcggtgttctctaaagtgaccatcgtgccagacgacgagcgtgtgctgcttggtgttgccggttttcaggcgcgcgccgcgctggcaaatatctttagtgaactgccttcgaaagaaaaacaggtagttaaagaaggcgcgaccactttgctatggtttgaacacccggcagaacgtttcctgatcgtaaccgatgaagctactgccaatatgctgaccgataaactgcgcggtgaagcggaactgaacaatagccaacagtggctggcattaaacattgaagcgggtttcccggtgattgatgccgcgaacagcgggcagtttatcccacaggcgaccaacctccaggcgctgggcggtatcagctttaagaaaggctgctataccggacaagagatggtggcgcgagcaaaattccgtggtgccaacaaacgcgcgctctggttgctgacaggtagtgccagccgactgccggaagctggtgaagacttagagctgaaaatgggcgagaactggcgtcgtactggtacggtgctggctgcggtaaaactggaagatggtcaggtcgtggtgcaggtagtgatgaataacgatatggaaccggacagcatcttccgcgtgcgcgacgatgcgaatacattgtgtatcgagccactgccgtattcgctcgaagagtaaatctctgtgtcgcatcaggcatttatcgcctgatgcgacgctggcgcgtcttatcaggcctacaaaggcatacccattacgcctgcccaatatacaaatagatcgccagaaagtggcacacactaccgccgagcacgaagccgtgccagatggcatggttgtatggaatgcgtttgcagacgtagaaaatcaccccgagcgaataaaccacgccgcctaccgccagtaaggtaacgctgcccgccgcgagcttaactgccatttcataaattaccaccagcgacagccagcccatcgccagataagtcaccagagataaaattttgaatcggtgcgcgatggtcagtttgaacagaatccccagcaatgccaggctccagataacaatcatcaacccgcgcgctaacggagaatccagccccaccagcaaaaacggcgtgtaggttccggcaatcaacaggtaaatagcgcaatggtcaaatttcttcagccacatttttgcccgttgatgaggaatggcgtgatagagcgtcgaagcgaggaacagcaggatcatactgccgccatagaggctgtagctggttatcgctgtggcgctggcattgagatccaccgcctgaaccagtagcaacaccagcccaacgataccaaacaccaacccaatgccgtgactgacgctgttggcaatttcctctgccagcgaatatccctgcttaatgaggggcttctgaaccataacttactccggagaaacgtacacgcacatgtatacctctccagcgtaactgagaatagttccagtgaacacctgttagctaaaataaattctgatttgagactaatctcctaaaaatcatgaaattaaatgcgaaatttcaactaacaggcgtgagttcaatttaaaggcatttaaattcaatcacataaaactgtgtctggccgggatagatgtcggcaatgacctttttcagttcagtcagggtcatattttcctgctctgcatgtttttccgtcagcgtatccagcgttacggttgaggttgcggtgacttcaatcgtgcaaaaataaccgtcatcttcaaaacgtccgacacgaagcacatcacccgttttgaagtgcgattcagactcgtcgcggatggtgatggttttacgcccagccagaatgtcatcctggaaacgttgaaaaaaagtgatgtcgtttggctgcatggtactatttcctgtaagaattgactcatctggagcctatgatagtgaaaaaactcaccttaccgaaagatttcttatgggncggcgcagttgccgctcatcaggtcgaangcggctggaacaaaggcggaaaagggccgagcatttgtgacgttctgaccggtggcgcacacggcgtgccgcgcgaaataaccaaagaagtcttgccaggcaaatactatccaaaccatgaagccgttgatttttatggtcactataaggaagacatcaagctatttgccgaaatgggcttcaaatgttttcgtacatccattgcctggacgcgcatttttccaaaaggcgatgaagctcagccaaacgaagaagggctgaagttctacgactctctgttcgatgaactgctgaaatacaacatcgaaccggtgatcaccctctcccactttgaaatgccgctgcatctggtgcagcaatacggtagctggaccaaccgtaaagtggttgatttctttgtacgtttcgcggaagtggtatttgaacgctataagcacaaagtcaaatactggatgaccttcaacgaaattaacaaccagcgtaactggcgtgcaccgctgttcggttactgctgctccggcgtggtgtataccgagcatgaaaacccggaagagacgatgtatcaggtgctgcatcaccagtttgtcgccagcgccctggcagtgaaagccgcgcgtcgcattaacctggagatgaaagtcggctgtatgctggcgatggtgccgntctatccctactcatgtaacccggacgatgtgatgttcgctcaggagtcgatgcgcgaacgctacgtctttaccgatgtgcagctacgcggctattacccgtcgtatgtgttgaacgagtgggagcgtcgcggatttaacatcaaaatggaagatagcgatctcgatgtactgcgcgaaggcacctgcgattatcttggtttcagctattacatgaccaacgcagtgaaggccgaaggcggcaccggcgatgcgatctctggttttgaaggcagcgtaccaaacccgtatgttaaagcatctgactggggctggcagattgatccggtgggtctgcgttacgcactttgcgaactgtatgcgcgttaccagaagccgctgtttattgtcgaaaacggttttggcgcttacgacaaagtggaagaagatggcagcatcaacgacgactaccgcattgactacctgcgcgcccatattgaagagatgaaaaaagcagtaacttacgatggcgtggatctgatgggctacacaccgtggggctgcatcgactgcgtgtcgttcactaccgggcagtacagcaaacgctacggctttatctatgtgaataaacatgacgacggtactggcgatatgtcgcgttcacgtaagaagagctttaactggtacaaagaagtgattgccagcaacggcgagaatctgtaattagccgatgtgcctgatgcgctacgctcatcaggcctggcactcttttaatatattgagctcgcaatattttatattacgcctcagccgaaacacacaaagcgcactttattaacaatctaaaaaggcgccgaagcgcctttagaagatagtcgaatcagtgaattactggtattcgctaatcggtacgcaggagcagaacaggttacggtcgccgtaaacatcatccaaacgtttcactgtcggccagtatttgtctgccacgcctgccgggaataccgcaacttcacggctgtacggatgcgcccactcggcgaccagttcgctctgaatgtgcggcgcgttcaccagcgggttatcttccagcggccagacaccggctttcacctggtcaatttctgcgcggatagccagcatcgcgtcgataaagcgatccagttccactttgctttcagattcagtcggttcaaccatcagcgtacctgccaccgggaacgacatcgtcggcgcgtggaaaccgtagtcgatcaggcgcttggcaatatccagctcgctgatgccggtttcttctttcaacggacgaatatcgaaaatacattcgtgcgccacgcgaccgtcacgaccggtatacagcaccgggaaggcatcctgcaggcggctggcaatatagttggcgttgangattgccacctggcttgcttttttcagcccttctgcgcccatcatgcggatgtacatccagctgattggcaggatagaggcgctaccgaacggtgccgcagaaaccgcgccctgacgggttaacatgccttcgatttgcaccacgctatgacccggtacaaacggagccagatgcgctttcacgccgatcggtcccatacccggaccaccaccgccgtgcggaatgcagaaagttttatgcaggttaaggtgtgaaacgtctgcgccaataaagcccggcgaggtgatgccaacctgggcgttcatgttcgcgccatcaaggtaaacctgaccgccgaactgatgcacgacttcacacacttcacggatcgtttcttcatacacaccgtgggtggaaggataggtcaccatgatgcaggagagattatcacctgcctgttcggctttcgcgcgcagatcagtcagatcgatatttccgtttttatcacacgccacaaccaccacctgcattcctgccatatgtgcagaagcggggttagtgccgtgcgcagaagccgggatcaggcagatatcgcgatgcccttcgttgcggctttcatgataatgacgaatcgccagcaggcccgcgtattcgccctgtgcgccagagttcggctgcatacaaacggcgtcgtaaccggtcagtttcaccagccagtcagccagctgcgcgatcatctgctgataaccttcggcctgctccggcgggcagaacgggtgcagttcggcaaattccggccaggtgattgggatcatctcggcggcggcgttcagtttcatggtgcaggaacccagcgggatcatcgcctgattcagcgccagatctttacgctccagcgagtgcatatagcgcatcatttcggtttcgctgtggtagcgattaaacaccggatgggtgaggatttngtcgtcgcgcagcatcgcaggctggatagagcggctgtcgtgagccacgtctttgtccagcgtgtcgatgtccagcccgtggttatcccccagtagtacgctgaaaagctgcatcacgttttcgcgcgtggtggtttcatcaagggtgatcccaaccgcgttcaggatatcgctacgcaggttgatttcagccgcttcggcacgcgccagtacgcccgccttgtcggccacttccacacacagagtgtcgaaatagtgcgcatggcgcagcttcagacctttttgttgcaggcctgccgccaggatatcggtcagacggtgaatgcggttagcgatacgtttcaggccaatcgggccgtgataaacggcatacaggctggcgatgtttgccagcagcacctgagaagtacaaatgttggagttcgctttctcacgacgaatatgttgctcgcgagtctgcatcgccatgcgcagcgcggtattgccagctgcatctttcgatacaccgataatacggcctggcattgagcgtttgtattcgtctttcgccgcaaagaatgccgcgtgtgggccaccgtaacccatcggtacgccaaagcgttgcgccgaaccaaaaacaatatccgcgccctgtttacccggcgcagttaacagcaccagcgccataatatcagcggcaacgctgaccacaattttgcgtgatttcagttcgctgataagcgcagtgtagtcgtgaatttcaccggtagtgccaacctgctgtaacagcacgccgaagatgtcctgatggtcgagcactttttgcgcatcatcgacaatcacttcaaaaccaaaggtttcggcacgagtacggaccacatccagcgtttgcggatgcacatcggaagccacgaagaagcggttggcatttttcagtttgctgacgcgtttcgccatcgccattgcttcggcggcagcggtggnttcgtcaagaagagaagcagaggccatatccagcccggttaaatccagcgttacctgctggaaattgagcagtgcctcaaggcggccctgcgagacttcaggttgatacggagtatacgcggtataccagcccggattttccagcatgttacgcaggataaccggcggtaactgcacggcggtgtaacccatgccgatgtnagacgtgaagcgtttattgcgactggcaatagccttgagttccgccagcgcggcgtattcggtcgccggtgcgccaacctgnggcggggtcgcaagctgaatatctttcggtacaatctggccggtcagcgcgtttaacgattgtgcgccaacggcattcagcatttcttgctgttgcgcggcgtccggtccgatatggcgttcaataaaagcgccgctattttcaagctggcttaacgtctgtgtcatgagcgatggttcctgaaacgtgcagtgaattgtgaacctctctccttgcgaagagagtgagggtgaggtgtaaatttcctcaccctgatcctctcccgcagaagaggaataaagccgttactcgtcttctaacaatgcttcgtatgcggtcgcatccagcagtgattccagttcgctttcatcgctggctttgattttaaagatccagccacctgcatacggttcgctgttcaccagttccggggaatcgctcagtgcgtcgtttaccgccacgatttcaccgcttactggcgcataaatgtctgacgccgcttttactgattcggcaaccgcgcagtcatcgcccgcgctaaccgttgcgcccacttccggcaggtcaacaaacaccatatcgcctaacagctcctgagcatgttcggtaataccaacggtgtaagtgccgtcggcttctttacgcagccattcgtgttctttgctgtatttcagttctgctggtacgttgctcatcaatcaatctccaaaaaagtaaatcacgcgacggctttgccgttacgcacaaaaacaggttttgtcactttaaccggcatttcacggttgcgaatttgcacaatcgccgtttcgccaatacctttcggcacgcgtgccagcgcaatgctgtaacccagcgtcggggagaaagtcccgctggtgataatgccttcatgctggttgccctgcgcatcggtaaaacgtaccggcagttcattacgcagcacgcctttttcggtcatcaccagaccaaccagtttttctgtgccatgctcacgctgcacttccagggcttcacgaccgatgaagtcacgatctgccggttcccaggcgatagtccagcccatgttggcggctaacggagagatggtttcgtccatctcctgaccataaagattcatgcccgcttccagacgcagcgtgtcacgcgcgcccagaccgcatggcttaacgcccgcttccaccagcgcacgccagaaatcggnnnntttttcattgggcagcgcaatttcatagcccgcttcaccggtataaccagtggtggcaataaacagatcgcccgcctgcacgccaaagaacggtttcatcccttccaccgcctgacgctgagcatcattaaacagtgtggcagcttttgcctgcgcattcggcccttgtacggcgatcatggaaaggtcatcacggacggtaatttcgatgccgaaaggttcagcgtgttgggtaatccaggagaggtctttttcgcgggtggcggagttaacaacgaggcggaagaaatcttcagtaaagtagtagacgatgaggtcatctatcacaccgccagaggcattcaacatccccgagtaaagggctttgccgcttttggtgagcttcgccacatcgttcgccagcagataacgcagaaactcccgggtgcggctgccgcgaagatcgacgatggtcatatgtgacacatcaaacattccggcatcggtacgtaccgcatgatgttcgtcgatttgcgaaccgtaatgcagcggcatcatccagccgtggaaatccaccatgcgagcgccgcaaagcgtgtgttgttcgtacaaaggagtctgttgtgccatcttgtcctcattgaataagcggggctgacaactttttcatggtgaaattatcaccacgaaacccagcatcggagccactcccggtccccaacgcaatcgttctcttttgcctgaacttaccaccgaaacagactgttaaccataaggtaaaattgatcatcacattagcttatggttaaaaaacgccaaaatcgcaacagaataaaaaaccaaaaaatacacaagtttctatataaagatgatgtgatgagaaagttaatttgaataaggcaatattaagagctgaaaaaatgtcaaaaaacactaaatcaaaaattcgtgacattagaaaatataatgcgaaaacggaggtgaaattagtttatttcaaatgaggaaaatctcccggcgaaaaaaccgggagatgaaagtgtgatgggtatcaaataaacagcagaagagaaatttttaacgcagccattcaggcaaatcgtttaatcccattgcctggcggataagttgtggtttaacgccaggaagcgtgtcggccagtttcagaccaatatcacgcagcagttttttcaccggattggtaccagaaaacagatcgcggaatccctgcataccagccagcatcagcgccgcactgtgcttgcggctacgctcatagcgacgcagataaatgtactgcccgatgtctttaccctgacgatgcaaccgtttcagttcagcaatcagctctgcagcatccataaagccaagatttaccccctgccccgccagcgggtgaatggtatgcgcggcgtcgcccaccagcgccagacggtgcgcggcaaactggcgcgcataacgccccgtcagtgggaacacctgacgcgcgctctcaaccttgcataagcccaggcgattatcaaaagcgatatttaacgcgcgattaaattcgtcttcacttgcctgctgcatccgctgcgcttcntctggcgacagtgaccagacaatcgagcaaagatgcggatcgctaagcggtaaaaaggccagaatgccttcgccatggaaaacctgccgcgccaccgcatcatgcggttcttccgtgcgtatggtcgctaccagcgcgtgatgctgataatcccagaaagtcagcggaatatcggctttgttgcgcaaccaggaattagcgccgtccgcgccaatcaccagacgcgccgttaacatactgccatctttcagcgtcaggaaggtttcattttctccccaggcgacctgctgtaattctgcgggggccaaaagagtgatatctgacgactgctgcgctttgttccacagcgcgtagtgaatcactgagttttcaacgatgtgcccaagatggctatagcccatgctttgatcgtcaaacgagatgtgaccaaaactgtctttgtcccacacttccataccgtgataacagctggctcggcgagagagaatgtcctgccagacgccaagacgggtgagtaatttttcgctggcggcattgatagccgaaacgcgcagttgtggtggtgcatccgccgccagaggttccggtacgcgctgctccagtacggcaacgcgtaagccgctaccctgtaagccgcaggcaaccgccagccccaccatgccgccgccaacaatggctacatcaacactttgcattgtttattccttaataaccgccttcaacgcgccacccaaccganggtgcgctgcgccagcacatcgcgtgccggggtgaataattccatcgtcatcagcccgatgttgcgcccgacaaccagtggcgtccaacggttggcaaaaagatgtacaaggctgtccgtgacgccaatggttgcttcgcgatcgctctgtcgacgctgctgataacgacacaatacgccgtaatcacccatgtcttctccgcgctcctgcgcctgagtcagggtttccgcaagactcatgacatctcgcataccgaggttgaacccttgcccggcaatcgggtgcagggtttgcgccgcattgcccaccagcacggtacgatgggtaatagatctggcggcgtgggttaacgccagcggataagcactgcgtttaccagcgtgggtaattttcccaagtcgccagccaaaggccgactggagttcacggcaaaacttctcgtcgctccacgacagcacctcttcgcgccgttccagtggatgacaccagaccagcgaacagcgtccgtcagacatcggcaacatcgccagcgggccatgttgcgtaaagcgttcaaaagcgcgcccttcatgcgcaacggaagtcgcaacgttggcaatcacagccagttgttcgtaaggctcctgctgccagtcaacgccgcacacagtggctaacgctgaatgggtgccatcagcggctaccagcacgcggcccgtcagcgtctcgccaccctccagcgtcacttcaacgtgactctgagtacgggcaacgttagccacgcgatcagggcaatgcagcgttacgccaggtgctttacgcagcaatgcaaacagccgttgcccgacattgtgcaattcgacaacctgtcccagcgccgccagttggtaatcttctgcggcgagggtgacaaatccagcgtgacctcgatcgctgacatgcacggtggtgatggcagttgcgcaatccgccagagattgccaaacgccgatgcgcgccagttgctgacaggtacccgccgccagcgctatcgctcgtccatcaaagcccggatgagcatgtgactctggcgcagtcgcttcaatcaaatgtaccggcagcgccccgtgacttaaccgggaaatagccagcgccagcgtcgcgcccgccatgccgccaccgacgatgattacgctcattgctttctcgcagcagccatcaacgcttcgatttcttccggctttttcaccacgctggcggtgaggttttcgttgccggtttcggtaatcacaatgtcgtcttcaatacgaatgccgataccgcgatattgttctggcacatccgcatccggcgcgatatacagaccaggctctacggtcagtaccatccccggttccagaatgcgcgagcgatcctgaccataaacgccaacgtcatggacatccagtcctaaccagtggctaaggccatgcataaagaaaggacgatgggcgttctgagcgatcagttcatcaatatcacctttcaggatgccgagttttaccaggccgctaaccataatgcgcaccacttcaccggtgacttccagaatggaggttcccggacgatacaggcgcaggctggtttcaagagactccagcacaatgtcgtagatttcgcgctgggcctgggtgaatttgccgttgaccgggaaggtacgggtgatatcgcctgcgtaacctttgtattcgcagcctgcgtcaatcaacaccaggtcgccgtcgcgcatttcacactcgttttcggtgtagtgtaaaatgcagccgttttcaccgctgcctacaatggtgttataggacggatagcgcgcaccgtggcggttaaattcgtggtgaatttcgccttccagatggtactcgaacattcccggacggcatttttccatcgcccgtgtatgtgccatggcggtgatttctcccgcgcggcggagtacggcaatctcttctggcgatttgaacaggcgcatttcatgaacaacaggacgccagtcgatcatcgttgccggtgcggtgagattttgccgcgaacctttacgcagtttttccagcgcactgttcacgatttcatcagcatatgcatattcgccctgagcatggtaaaccacatccagaccattaagtagttgataaagttgctgattaatttcgctgaatgccagtgcgcggtcaacgcccagtttctctggcgcggcatcctggcctaagcgacggccaaaccagatctccgccgtcaggtcgcgaacgcggttaaacagaacgctgtggttatgagtgtcatcgcttttaatcagcaccaacaccgcttccggttcgttaaagccggtgaagtaccagaagtcactgttctgacgataggggtattcgctgtcggcgctacgtgttacttctggtgcagcaaaaatcagcgcggcgctgccgggttgcatttgctccaccagggcctgacggcgacgctgaaactcttgccgggatatctcactcataacactctccttacgttttttgtttttagtgtagagtcggtttttgtacttctggcgcggtcggttgcggatgagtaaaggtgtcgtggcataacagcgcggcaacacgaacgtattcgatgatctcttcaagcgacatttcaagctcttcctgatcttcgtcttcgtcgtaacccagttgcgcaatgttacgcagatcgtcgatagcttcaccggtttcgccggtcactttatccagcttcggttgcgtaacaccaagaccaagcaggaagtgattgacccaacctgccaatgcatcagcccgatcgaaaacgctgacatcatcgccatcaggcagataaagctgaaaaaggaagccgtcatcctgcagggcatcgctggtggcagagtgcattttacgcagtgcctgtgccagctcatgaccgaaagccatgccttcgttcgtcaggtcgtgaagtagcggtagccatgagctgtcatcgttaccgccacatatcatcccactgattaaaccatgcatctcagcaggggtcagacccgtcccttgttggttcagatactggttcatttcgttgtaaccaggcatttcgttctgtatagacataagcattcgtcgtcaaagggaggaatattcatgatatgctaccactttgggccctggtggaccagaaaagggcttgtctcttctcatcagggtagctatagtgtcgccccttcgcagaccatgggtctaaagacgaaggcagcgcagtcaatcagcaggaaggtggcatgtctgcacaacccgtcgatatccaaatttttggccgttcactgcgtgtgaactgcccgcctgaccaaagggatgcgttgaatcaggcagcggacgatctgaaccaacggttgcaagatctgaaagaacgcactagagtcacaaatactgaacagttggtcttcattgccgcattgaatatcagctatgagttagcgcaagaaaaagcgaagactcgtgactacgcggcaagtatggaacagcgtattcggatgctgcagcagaccatagaacaagcgttacttgaacaaggtcgcatcaccgaaaaaactaaccaaaactttgaatgacacttttcggtttactgtggtagagtaaccgtgaagacaaaatttctctgagatgttcgcaagcgggccagtcccctgagccgatatttcataccacaagaatgtggcgctccgcggttggtgagcatgctcggtccgtccgagaagccttaaaactgcgacgacacattcaccttgaaccaagggttcaagggttacagcctgcggcggcatctcggagattcccttcttatctggcaccagccatgacgcaactaccagaactcccactgacattatcccgacaagaaatccgcaaaatgattcggcaacgtcgtcgtgcgttaacgccggaacaacagcaggaaatgggtcaacaagccgctacccggatgatgacttatcccccggtggtgatggcgcatacggtcgctgtattcctctcttttgatggtgaactcgacacccagccgcttatagaacaantctg

SEQ ID NO: 1481 - DNA, 20681 bp, Escherichia coli
  Strain O55:H7
  modified_base (516)..(516): a, c, g or t
  modified_base (927)..(927): a, c, g or t
  modified_base (947)..(949): a, c, g or t
  modified_base (1067)..(1067): a, c, g or t
  modified_base (2462)..(2465): a, c, g or t
  modified_base (3325)..(3326): a, c, g or t
  modified_base (3348)..(3348): a, c, g or t
  modified_base (4303)..(4303): a, c, g or t
  modified_base (12311)..(12311): a, c, g or t
  modified_base (14108)..(14108): a, c, g or t
  modified_base (15458)..(15458): a, c, g or t
  modified_base (15461)..(15464): a, c, g or t
  modified_base (19487)..(19487): a, c, g or t
gtaagcgcgtatatcttccagttttgcatccctttagtgccggtaatttgctgttcctgaattaccatccgcaaagcgaactggtgatgaacaggttgaaaatccatgagccaaaactggatgtgcgtgacgtgctccccctttcccgattagacgtgctgatcacaccgctggtcgcctttgatgagtacggtcagcgcctgggaatgggcggtggtttttatgatcggaccttacaaaactggcagcactataaaacgcaaccggtgggttatgcgcatgattgtcagttggtggaaaaactccccgttgaagagtgggatatccctcttcctgcggtggttacaccgtcgaaagtctgggagtggtaagggcgatacacctgcatcgccctgattgacatcgttgattctttaacctaatttagtgagtaagggtaagggaggatgactcctcccctgagactgactgttaataagctggcaaacttatcagtaacagtacaatcagtatgangacaagtcgcatcataatccttctccttcaagccctcgcttcggtgagggctttaccgttacagccccatgctgccctgccatcgtaaactctctttaaataaccacaacgcattgatctacctttaaatcttttcttcgagcgcactcgtaaaacgtcatgtaaggcagacatacattgcaggaataagggattaattacggcagtaaacgtgggcgatgaagtggctatcaaaaagttcggttcagggcgatgcaccccgcatcgccctgattgacatcgttgattctttgacctaatttagtgagtaagggtaagggaggatgactcctcccctgagactgactgttaataagctccgaaacttatcagtaacagtacaatcagtatgatgacaagtcgcatcataanccttctcctttaagccctcnnntcggtgagggcttcaccgttacagccccatgctgtcccgccatcgtaaatccccattaaataaacacaacgcattgatctgactttgatttattttctggagcagactcgcaaagtanaatgcgcaacgcggcaacggtgtggagaagggataaaaaaacgggcaagtcagtgatctgcccgttaattttcagagaaggggaattagtacagcagacgggcgcgaatggtacccggaatagctttcattgcctgcagcgctttttcggcaacgtcttcgtcagcttcaatatcaataactacataacccatctgggcggaagtttgtagatattgcgcggcgatgttgacgccctgctcggcgaagattttgttcagcgcagttagcacgcccggacggttttcgtggatgtgcatcagacgacgaccaccatgcagtggcagcgagacttccgggaagttcaccgcagagagcgttgagccattgtcagaatacttgatcaatttacccgcaacttccaggccgatattctcctgcgcttcctgagtcgaaccgccaatgtgtggcgtcagaaggacgttgtcgaattcacacagtggagaggtaaatggatcgctattggtcgccggttccgtcgggaatacgtcgattgccgcccccgccagatgtttgctcgccagcgcatcacacagcgccggaatatccaccacagtaccgcgcgaggcattaatcagcagcgagccgggcttcattagcgaaatctctttcgcgcccatcatatttttggtggacggattctctggtacatgcagactcaccacatcgctcatattcagcaggtcagaaagatgctgtacctgagtggcgttgcccagcggcagtttgttttcaatatcataaaagtaaacatacattcccagcgattcagccagaatgcccaattgcgtaccaatatgaccgtagccgatgatacccagctttttgccgcgcgcttcaaaagaacccgccgccagtttgttccacacgccacggtgcgctttagcattggcttccggcacgccgcgcaatagcagcagcagttcgccaatcaccagctccgcaacagagcgcgtatttgagaacggtgcgttaaataccgggatcccgcgctttgccgccgcatccagatcaacctggtttgttcctatacagaaacagccaatagcgaccagcttttctgcggcgttgatcacgtcttcagtcagatgggtacgggatcgcaggccgatgaagtgggcatcgcggatggattcttttaattgttcatcatccagcgcgcctttgtgaaattcgatgttggtgtaaccagctgcacgaaggctttccagcgccttttggtgcacgccttctaccagcagaaacttaatcttgtctttctccagcgatacctttgccatttacccaatcctgtctttgaaatgttgtgtgcggatttgcatccgcctttcaacatatcaaaaaataatattgcggnnnnatgaacgtttgcgtcgcgatgttgaggaaatatcacgcaaaggtatttcttggttgaatatgctggtttagaggatttatttagagcaatcgacaatagccaagtaaaaacgtgacacatgtcaccaaatttaatgaagagaatttttttaacgggggaggttcccccgtcagatcatttcacaatggttttgacaccgtcaggtgtgccaatcagcgcaacgtccgcgccacggttagcaaacaagccaacagtcaccacgccaggaatcgcatttatggcgttttccatcgctatcgggtcaaggatttccatgccgtggacgtcgaggatcacgttgccgttatcggtcactacgccctgacggtattccggacgaccgcccagtttcaccagctggcgcgccactgcactacgtgccatcgggataacttctactggcagcgggaatttacccagaatatcaacctgcttggaagcgtctgcaatacagataaatttttctgcaaccgaagcaatgattttttcacgggtcagcgccgcgccgccgcctttgatcatttgcatgtggccgttgatttcatctgcgccatcaacgtagatgccaaggctgtcgacttcgttgagatcaaaaacgtgaatgccgaggcttttcagtttttcagtggaagcatctgaactggaaacggccccttcaatctggcctttcattgtaccgagcgcgtcaataaagtgtgcggcggtggaacctgtacctacaccaacaatggtgccgggctgaacatactgaagtgccgcccatcctactgcttttttcaattcatcctgcgtcatgatcgtttcgcctgtggtatgaaatnncacacgcattatatacaaaaanagcgattcagaccccgttggcaagccgcgtggttaactcatccataaaatatcgcgcaatggcgggcatcccctttcgccccgcaaataaagcatacaacggtctgggtatgccgctccacggtgcgaacagaggcaataacgccacgccattcaacataaccagggcgcgaagtcgctaagcgaaatgcaatagcgcaaatccctgatcttttaagctgcgcgtttaaccattgatacaaatgttacccgccgacggctgcggtatatgcaacctgacacaaaattgtgtcatagtgcaggaaaaagcatttaccaggagcagacaacagcaatgaaacgcccggactacagaacattacaggcactggatgcggtgatacgtgaacgaggatttgagcgcgcggcacaaaagctgtgcattacacaatcagccgtctcacagcgcattaagcaactggaaaatatgttcgggcagccgctgttggtgcgtaccgtaccgccgcgcccgacggaacaagggcaaaaactgctggcactgctgcgccaggtggagttgctggaagaagagtggctgggcgatgaacaaaccggttcgactccgctgctgctttcactggcggtcaatgccgacagtctggcgacgtggttgcttccggcactggctcctgtattggctgattcgcctatccgcctcaacttgcaggtagaagatgaaacccgcactcaggaacgtctgcgtcgcggcgaagtggtcggcgcggtgagtattcaacatcaggcgctgccgagttgtcttgtcgataaacttggtgcgctcgactatctgttcgtcagctcaaaaccctttgccgaaaaatatttccctaacggcgtaacgcgttcggcattactgaaagcgccagtggtcgcgtttgaccatcttgacgatatgcaccaggcctttttgcagcaanacttcgatctgcctccaggcagcgtgccctgccatatcgttaattcttcagaagcgttcgtgcaacttgctcgccagggcaccacctgctgtatgatcccgcacctgcaaatcgagaaagaactagccagcggtgaactgattgacttaacgccagggctatttcaacgccggatgctctactggcaccgctttgctcctgaaagccgcatgatgcgtaaagtcactgatgcgttgctcgattatggtcacaaagtccttcgtcaggattaatccatcaaataatgcctgatagcacatatcaggcgttatcctcacttctttttgtattccttgaatcacatcacaaaatagacaaatctcaggcggcaaaaaacgacgtctgaatgcattttttttgctggcgacaaacccacgtaaaaagctcaccgtaagcgcaaataccctcattttgattgcgttttacggagcaaataatgtctaacgagcaggagtggcaacagcttgccaacaaggaattgagccgtcgggagaaaactgtcgactcgctggttcagcaaaccgcggaagggatcgccatcaagccgctgtataccgaagccgatctcgataatctggaggtgacaggtacccttcctggtttgccgccctacgttcgtggcccgcgtgccactatgtataccgcccaaccgtggaccatccgtcagtatgctggtttttcaacagcaaaagagtccaacgctttttatcgccgtaacctggccgccgggcaaaaaggtctttccgttgcgtttgaccttgccacccaccgtggctacgactccgataacccacgcgtggcgggtgacgtcggcaaagcgggcgtcgctatcgacaccgtggaagatatgaaagtcctgttcgaccagatcccgctggataaaatgtcggtttcgatgaccatgaatggcgcagtgctaccagtactggcgttttatatcatcgccgcggaagagcaaggtgttacacctgataaactgaccggcaccattcaaaacgatattctcaaagagtacctctgccgcaacacctatatttacccgccaaaaccgtcaatgcgcattatcgccgacatcatcgcctggtgttccggcaacatgccgcgatttaataccatcagtatcagcggttaccacatgggtgaagcgggtgccaactgcgtgcagcaggtagcatttacgctcgctgatgggattgagtacatcaaagcagcaatctctgccggactgaaaattgatgacttcgctcctcgcctgtcgttcttcttcggcatcggcatggatctgtttatgaacgtcgccatgttgcgtgcggcacgttatttatggagcgaagcggtcagtggatttggcgcacaggacccgaaatcactggcgctgcgtacccactgccagacctcaggctggagcctgactgaacaggatccgtataacaacgttatccgcaccaccattgaagcgctggctgcgacgctgggcggtactcagtcactgcataccaacgcctttgacgaagcgcttggtttgcctaccgatttctcagcacgcattgcccgcaacacccagatcatcatccaggaagaatcagaactctgccgcaccgtcgatccactggccggatcctattacattgagtcgctgaccgatcaaatcgtcaaacaagccagagctattatccaacagatcgacgaagccggtggcatggcgaaagcgatcgaagcaggtctgccaaaacgaatgatcgaagaggcctcagcgcgcgaacagtcgctgatcgaccagggcaagcgtgtcatcgttggtgtcaacaagtacaaactggatcacgaagacgaaaccgatgtacttgagatcgacaacgtgatggtgcgtaacgagcaaattgcttcgctggaacgcattcgcgccacccgtgatgatgccgccgtaaccgccgcgttgaacgccctgactcacgccgcacagcataacgaaaacctgctggctgccgctgttaatgccgctcgcgttcgcgccaccctgggtgaaatttccgatgcgctggaagccgctttcgaccgttatctggtgccaagccagtgtgttaccggcgtgattgcgcaaagctatcatcaatctgagaaatcggcctccgagttcgatgccattgttgcgcaaacggagcagttccttgccgacaatggtcgtcgcccgcgcattctgatcgccaaaatgggccaggatggacacgatcgcggcgcgaaagtgatcgccagcgcctattccgatctcggtttcgacgtagatttaagcccgatgttctctacacctgaagagatcgcccgcctggcagtagaaaatgacgttcacgtagtgggcgcatcctcactggctgccggtcataaaacgctgatcccggaactggtcgaagcgctgaaaaaatggggacgcgaagatatctgcgtagtcgccggtggcgtcattccaccgcaggattacgccttcctgcaagagcgcggcgtggcggcgatttatggtccaggtacacctatgctcgacagtgtgcgcgacgtactgaatctgataagccagcatcatgattaatgaagccacgctggcagaaagtattcgccgcttacgtcagggtgagcgtgccacactcgcccaggccatgacgctggtggaaagccgtcacccgcgtcatcaggcactaagtacgcagctgcttgatgccattatgccgtactgcggtaacaccctgcgactgggcgttaccggcacccccggcgcggggaaaagtacctttcttgaggcctttggcatgttgttgattcgagagggattaaaggtcgcggttattgcggtcgatcccagcagcccggtcactggcggtagcattctcggggataaaacccgcatgaatgacctggcgcgtgccgaagcggcgtttattcgcccggtaccatcctccggtcatctgggcggtgccagtcagcgagcgcgggaattaatgctgttatgcgaagcagcgggttatgacgtagtgattgtcgaaacggttggcgtcgggcagtcggaaacagaagtcgcccgcatggtggactgttttatctcgttgcaaattgccggtggcggcgatgatctgcagggcattaaaaaagggctgatggaagtggctgatctgatcgttatcaacaaagacgatggcgataaccataccaatgtcgccattgcccggcatatgtacgagagtgccctgcatattctgcgacgtaaatacgacgaatggcagccacgggttctgacttgtagcgcactggaaaaacgtggaatcgatgagatctggcacgccatcatcgacttcaaaaccgcgctaactgccagtggtcgtttacaacaagtgcggcaacaacaatcggtggaatggctgcgtaagcagaccgaagaagaagtactgaatcacctgttcgcgaatgaagatttcgatcgctattaccgccagacgcttttagcggtcaaaaacaatacgctctcaccgcgcaccggcctgcggcagctcagtgaatttatccagacgcaatattttgattaaaggaatttttatgtcttatcagtatgttaacgttgtcactatcaacaaagtggcggtcattgagtttaactatggccgaaaacttaatgccttaagtaaagtctttattgatgatcttatgcaggcgttaagcgatctcaaccggccggaaattcgctgtatcattttgcgcgcgccgagtggatccaaagtcttctccgcaggtcacgatattcacgaactgccgtctggcggtcgcgatccgctctcctatgatgatccattgcgtcaaatcacccgcatgatccaaaaattcccgaaaccgattatttcgatggtggaaggtagtgtttggggtggcgcatttgaaatgatcatgagttccgatctgattatcgccgccagtacctcaaccttctcaatgacgcctgtaaacctcggcgtcccgtataacctggtcggcattcacaacctgacccgcgacgcgggcttccacattgtcaaagagctgatttttaccgcttcgcccatcaccgcccagcgcgcgctggctgtcggcatcctcaaccatgttgtggaagtggaagaactggaagatttcaccttacaaatggcgcaccacatctctgagaaagcgccgttagccattgccgttatcaaagaagagctgcgtgtactgggcgaagcacacaccatgaactccgatgaatttgaacgtattcaggggatgcgccgcgcggtttatgacagcgaagattaccaggaagggatgaacgctttcctcgaaaaacgtaaacctaatttcgttggtcattaatccctgcgaacgaaggagtaaaaatggaaactcagtggacaaggatgaccgccgatgaagcggcagaaattatccagcataacgacatggtggcatttagcggctttaccccagcgggttcgccgaaagccctacccaccgcgattgcccgcagagctaacgaacagcatgaggccaaaaagccgtatcaaattcgcctgctgacgggggcgtcaatcagcgccgccgctgacgatgtactttctgacgccgatgctgtttcctggcgtgcgccatatcaaacatcgtccggtttacgtaaaaagatcaatcagggcgcggtgagtttcgttgacctgcatttgagcgaagtggcgcaaatggtcaattacggtttcttcggcgacattgatgttgccgtcattgaagcatcggcactggcaccagatggtcgagtctggttaaccagcgggatcggtaatgcgccgacctggctgctgcgagcgaagaaagtgatcattgaactcaatcactatcacgatccgcgcgttgcagaactggcggatattgtgattcctggcgcgccaccgcggcgcaatagcgtgtcgatcttccatgcaatggatcgcgtcggtacccgctatgtgcaaatcgatccgaaaaagattgtcgccgtcgtggaaaccaacttgcccgacgccggtaatatgctggataagcaaaatcccatgtgccagcagattgccgataacgtggtcacgttcttattgcaggaaatggcgcatgggcgtattccgccggaatttctgccgctgcaaagtggcgtgggcaatatcaataatgcggtaatggcgcgtctgggggaaaacccggaaattcctccgtttatgatgtattcggaagtgctacaggaatcggtggtgcatttactggaaaccggcaaaatcagcggggccagcgcctccagcctgacaatctcggccgattccctgcgcaagatttacgacaatatggattactttgccagccgcattgtgttgcgtccgcaggagatttccaataacccggaaatcatccgtcgtctgggcgtcatcgctctgaacgtcggcctggagtttgatatttacgggcatgccaactcaacgcacgtagccggggtcgatctgatgaacggcatcggcggcagcggtgattttgaacgcaacgcgtatctgtcgatctttatggctccgtcgattgctaaagaaggcaagatctcaaccgtcgtgccaatgtgcagccatgttgatcacagcgaacacagcgtcaaagtgatcatcaccgaacaagggatcgccgatctgcgcggtctttccccgcttcaacgcgcccgcactatcattgataattgtgcacatcctatgtatcgggattatctgcatcgctatctggaaaatgcgcccggcggacatattcaccacgatcttagccacgtcttcgacttacaccgtaatttaattgcaaccggctcgatgctgggttaatggtttgtcccgtcacgatcttcagcaatatgctgaagcatcgtggcggtataacgatgatttctgattgaataaagatattcctgcatatacatcggcctgtgcggcgcatcaaaatatttcagcgttgccggattcaccagtcgccaggcaaaatgcgggatcaccgtcagaaaatgtccgcgctccacggcgctgattttggccataaaactgtagggacgataaataatggtgggattgatcccacaaggtcgcatattcgcatcaatcattgcttcgaagttagcccggttttgaaagcgcatttgtagctagggcagctcctgaagcagctcttgctcttgacgctcttcataacggcgagaaacgagaaagttcaatcgcagcggtggtaattcactgatagtcaggttttccagttcctgaactcgtgcagatacatgctgtggggagataataaaatctaactgacggtcaaaaagattatcgataacgccgttttcgctgaactcaactggctgggcggtcacgccttcatacttatctccgagactaatcaactgatcgaaaataattgtcggataagtattatctatgccaatcacaatttctcgtgaacgacgccctgagttatggatttcattatcaatcgcagaaagtcgttgataaaccgggaacagtttttgatacagttcctgaccggctttattgaggctgatattattatctttgcgggtaaatagcgtatagccaatttgttcttccagcgcggcaatgcttttaccaaatggcgaagccgtcatatggattttttctgccgcccgggcaatwttattggtttgcgctaataaaatgaaattgcgcatctttttcgaaataaaaatgtccatcccccctccccgcatccttgtccgcttaaccgtttcagtcagcctatccttgatgaaaccgcgagcaaagataggtgattacgtcatggttttacagaaaattacagaaaaaggaggcaatatcgggtaaaggcattagcccgacgaatacgtcgggctacaagtattattgtgctgcaggtgttttaacgggttgttgatccacaggttctaactggaagaccacatcgacctgatcatcaaactgaatagcggcctgctcgtaagtttcctgggcagacaccggcgcggcatcggctttcatcatccgcaccattgggctgggctgatagttggaaacatggtagcgcacgctatataccggccccagtttacgatgaaagccgttcgccagttcctgcgcctgatgaatcgcgttatcaatcgctgccttacgcgctttgtctttataggcatccggctgcgccacgcccagcgacactgaacgaatttcgttaagacccgccttcagcgcgccatccagcaaggaattcagtttgtctaactgacggagcgtgacttccaccgttctcacagcgcggtagcctttcaggatacttttaccatcctgataatcataatctggctgggtgcgtaaattcgctgagctgatatcttttttcgcgatctgattgagttcaaggaaggaaatgtattgtgcgacgcgctcatctgcctgtttcttggctgtagcggcatccttcgcggccacgttaacttcaatcgcaagagtggcaatgtctggcaccgcatccacacttgccgtaccggaggtgacaatatgcggtccatccggcaattcgttagcctgcgctgccatcccgctaatacccattaatgccgccagggcgataactttgaacttcacgttagtctctccgtgttaattgacttgcccaaaattcaggacctctggaggcaagcttagcgcctctgttttatttttccatcagatagcgcctaactgaacaaggcttgtgcatgagcaataccgtctctcgccagctgcaaggctataaaccacatgacacatcccactaccagattgataatgcgctgtgattttgccgtgcgcaggcgcggtgccagccaggctgcgagaatagccagaccaaagaaccacaggaaagaggcgctaattgtcccgagcgcaaaccaacgttttggttngacgtcaagctgcccgccaaggctgcccagtacaacaaaagtatccaggtaaacatgcggattcagccaggtcactgccaacatggtggcgataattttccatctgccttgcttcaggacttcggcactagctaactcaatattactactcatcgctgttttaaaagcgccaaaaccataccacagcaagaagactacgccgccccaggtgaccagcgccagcaaccacggcgactgcatcaataacgcgctaccaccaaaaatccccgcgcaaatcaggaccaaatcgctgatagcgcaaagtaaggcaatcataatgtggtactgacgacgaatgccctgattcatcacaaaagcattttgtgggccgagcggcagaatcatagctgccccaagagcaagaccttgaaagtaataagaaaacacgttggatattccgaattaagtatctgatgcagagactatatcgcgggattgttattagcggaaattgataatattaattggcaatcagaataactaataagagagaggccagagagtattatctggcctcagcgttgattacgcagctttgtcttctttcacccgcttaaagttcacatccatttgcgggtacgggaagctgataccggcggcatcaaattcacgtttaatacgctccagcacatcccagtacacgttttgcagatcgccgctgttgctccagacgcggaccacgaaattaatcgacgatgcaccaagttcgttcaggcgcacagtcatttcgcgatctttcaaaatgcgatcttcagactggataatattggtcaggatctgcttaacctgatcgatatcggaatcatacgccacgccaataataaattcgttacggcgaactggctcgcgggagaagttaataatatttccggcaataattttaccgttcggaataacgataattttaccgtctgcagtacgcatggtggtggagaaaatctgcacactcagcacagtaccggctacgccgccgaggtcaacatattctccggcacggaacgggcggaacatgacaagtaacacgccagcggccaggttagaaagtgacccctgcaaagccagaccaacagctaagcctgcggcaccgagtacagcaatgactgacgctgtttgtacacccacgcgtcccagggctgcgattagcgtaaaggcgataataccgtaacggactaatgcagaaagaaaatcagcaacagtggcatcgattttacgggagatcatcaggcgattcaccgcgttggaaatcatccgcgcgataatcaaaccaacgatgatgatcgcgagtgccgccacgatgtttactgcataacttagcagcagcgcctggttagctaccagccagcttcccgcgccgtttatgctatcgacaacattcaaatcttccattcaatattccttttcaactgactcaaaatggagaaatacactccgccgccttatgacgggcagtctgacaagggtaaacaataaagcataattttgccaaatagatcacagatttctcatctgaatcaccttgcttttggcaaaaaaatccccgcagagcggggctcagacagatatcaatgtgcgctttgtcatgccggatgcggcgtgaacgccttatccggcctacaaaaacctgcaaattcaatatattgcaggatacgtgtaggcctgataagcatagcgcatcaggcaattttgcttttggcgaaaaaaagacccgcagagcgggccttgagataagcagaaaggaatgacttacagaacgtcgancgcgttcagttcctggaatgctttttccagacgagcgatcatcgaagtctgaccggcacgcagccatacgcgcggatcgtagtatttcttgttcggctgatcttcgcctttcgggttacccagctgaccctgcagataagcttcgttcgctttgtagtagttcagaacgccttcccaggttgcccattgggtatcggtatcgatgttcattttcactacgccgtagcttacggagtctttgatttcctgagcagtagaaccggaaccaccgtggaatacgaagttcaggctgttgtgcggcaggttgtgtttcttagaaacatattcctgagaatcacgcaggatggtcggagtcagaaccacgttacccggcttgtaaacaccgtgtacgttaccgaaggacgctgcgatggtgaaacgcgggctgattttgctcagttcggtgtatgcgtaatcaacgtcttccggctgggtgtacagtgcagaagcgtccatgtggctgttgtccacgccgtcttcttcaccaccggtgcaacccagttcgatttccagagtcatgccgattttggacatgcgctccaggtatttagagcagatttcgatgttctcttgcagagattcttcagacaggtcgatcatgtgagaagagaacagcggcttaccggtagctgcgaagtgtttttcacccgcgtccagcagaccgtcgatccacggcagcagtttcttcgcgcagtggtcagtgtgcaggataaccggaacaccataatgttcagccatctggtgaacgtgatgcgcaccagagatcgcgcccaggatagcagcaccctgcggaacgtcagatttcacgcctttaccagcgataaaggaagcaccaccgttggagaactgaacgataaccggcgctttaactttagcagcagtttccagtacggcgttgatggagtcagtaccgacgcagtttactgctggcagtgcgaagttgttttcttttgctacctggaaaactttctgtacgtcatcaccagtgattacgccaggttttacgaaatcaaaaatcttagacatgtctcttgtcctgtatcgtcgggccttatactcgtcatacttcaagttgcatgtgctgcgtctgcgttcgctcaccccagtcacttacttatgtaagctcctggggattcactctcttgtcgccttcctgcaactcgaattatttagagtatgaaaaaatgcgtgctctaaaagcgcgctgaaacaagggcaggtttccctgccctgtgattttttacttcttagcgcgctcttcgagcatcgctactgcaggcagtactttaccttccacgaattcgaggaatncgnnnncgccagtggagatgtaggagattttgtcagcaatgccgaacaggtcgattgctgccagagtgtcgccgccgccagcgatggagaacgcttcgctgtctgcgatagcgttagccacgatttcagtacctttgcggaagttcgggaattcgaacacgccaaccggaccgttccacagaatggttttcgcattcttcaggatttcagccagttcctgagcggaagcatcaccgatatccaggatctgctcgtcagctttcacgtcgttaacagatttcagggtagccggagcggtttcagagaactcggttgctacgcgaacatcagacggaaccgggatgttgcaggtggtcagcagacgttttgcttcgtcaaccaggtcagcttcgtacagggatttacccacatcgtggccttgtgccgcgataaaggtgttagcgataccaccaccaacaatcagctggtcagcgattttagacagggagtccagaacggtcagtttggtagatactttagaaccaccaacgatagccaccatcgggcgagcaggttctttcagtgctttacccagcgcgtccagttcagctgccagcagcgggcctgcgcacgcaacgtcagcgaatttaccgataccgtgagtagaagcctgcgcgcggtgagcagtaccgaatgcgtccattacgaacacgtcacacagtgcagcgtattttttggacaggatttcgtcgtctttcttctcgcctttgttgaagcgaacgttttccagaacaaccagttcaccttcagcaacgtcaacgccgtcgaggtaatctttaaccagacgaaccgggttagacagtttgtctttcaggtagttaacaaccggcagcagagagaattcttcgttgtactcgccttcggtaggacgacccaggtgggaagttaccatcacttttgcgccttgtttcagggccagttcgatggtcggcagagaagcacggatacgcgcgtcgctggttactttcccgtcttttactggtacgttcagatccgcacggataaatacacgtttcccagcaagatccagatcggtcatcttaattacagacatggtgaatcctctcgttgattctaaaagttttgcagacgctgcttgcgtcttacctgaaagcaacagtagccatagctaacgtcgtgtcgagcattcggttagcaaagccccattcgttatcgcaccagaccaacgttttgatcaggtgtgcgccactgacccgggtttgggtgccatcgacaatggcactgtgcggatcgtggttaaaatctacagagaccaacggcaattccgtatagtcaactataccatgaaatgcaccttgtgctgctttttgcagcaacaggttgacttcattggcttttacaggtttcttcaccgtcacgcttaaatcgattgccgtcacatttatggttggcacacgtaccgcaatcgcttcaaagcgatcgttaaattgcggaaaaaatcgtgtgataccggcggccagtttagtatcgaccggaatgatcgactggctggctgcccgggtgcgacgcaggtcaggatggtatgcatcaataacctgttgatcgtgcatggcggagtgaattgtggtcacagtgccggactcaataccgtacgcatcatctaacaatttgatgacgggaattatgcaattcgtggtacaggaagcgttagaaacgatgcggtgctccgcacgaagttgatcctgattgacgccgtaaacaacggtcgcgtcgagatcgttactgccaggatgtgaaaagagcacttttttagccccggcggcaatgtgcgcttcgccatgctcgcgggagccatatacgccggtgcagtcgaggactacatcaacgccaagttcacgccaggggagcgattgcagtgaacgttcatgcaatacgcggatggcgtcatcaccaacaaaaagttgatcgcgttcctgtcgtacttcccatgcaaaacggccatggctggtgtcgtatttcaacaaatgcgccatgcccgcagcatccgccagttcgttgattgccaccacggtaatttccgcccggcgtccggattcatacaaagcacgaaccacattacgcccgatgcgaccgaagccatttatcgctacgcgtacggtcatagatctcctgcaaggttttccctgagcaaatttgccagacagagtaatccagcaaatcgtccggggaaaccttacctgtcgcaaactgcgactgattggttaattgtcgaacacttaatcgactgaaacgcttcagctaggataagcgaaacgtggaataaaaggaatgattgtccagtcaaagaaaacaattatctgacttacgtcacgttttcagccccgcccctgtggaatttattccactttgcagaatcacgaataagcgtagcaaaatcttttcgttgtgccgtcacaaaccctgacttatatcagaatatgactgatgcagcgtcgatattatccgtaatacgtccgagtttcggagtactccaatgatgacattgccctacccatattcttcctccgcacgcttttacgcactgcgcctcctccccgggcaggaagttttttcccagctacacgcttttgcacagcagcagcaacttcatgccgcctggattgcaggctgtaccggtagcctgactgacatcgccttgcgctatgccgggcaagaaggcaccacgctcctgaacggtacattcgaagtgatctcactaaacggcacgttggaacagagtggtgagcatcttcatctctgcgtttccgatccacacggcacgatgcttggcggtcatatgatgcccggctgtaccgtgcggaccacgcttgaactggtgatcggtagccttgaggaactggcgtttagccgccaaccttgcgcgctttctggttacgacgagttgcatatttcccccgttaaataactactttcagagaggttttcttatggcgcgtagccacttttccagtcaggcactggtgttgatcgttatatctatcgccatcaatatgatcggcgggcaactggccagcatggtcaaattacctatatttctcgactccatcggcacacttattagcgcggtactgcttggtccggtgatcgggatgctgaccggcttactgaccaatttactctggggattactgaccgacccgatcgctgccgcttttgcccccgtcgcgatggtcatcggcctggtcgccggttggctggcgcgagcgggttggtttcgcaccctgccaaaagtcgttgtcagcggcgtgattattacgcttgcggtaacggtcgtcgctgtaccgctgcgtactgcgctgttcggcggtgtcaccggtagcggagccgatttgttcgttgcctggatgcactcgatggggcaaaacctggtggagtcggtggcgattacggtgataggcgcgaacctggtcgataaaactcttacagcggtgattgtctggcttttactgcgccagctgccgattcgcaccacgcgccattttccggcaatggctgccgtgcgctaaatgcatccatttacctcattaacactatgggcattggcggcctgcaccacgcttatcctgcccgcgcagaccattttgccgatctatagcgcggcgacctttttttgccttattgcgctaaaggccacgcggcggcgggcaaaatatgtcgtctggctgatgttctcgctgggagccgggctgtggctggtacacggtggctggctaacagaatggctaagcggcacgccgcgttcgccggagcgttggacgcatgctattacgctctggttgcggattctggcgattgtttcaacctcacagttgtggatgcagtacgtccccgtgcaatgttttatccgcgctctgtttgcttctcgcctgccgccgggcgtcgcttatctgtttgccgggccgttattggtcgttgagcagttaaaacggcaattagcgattattcatgaagctcagcgtgcccgcggcntgccgctggatgagggctggtatcagcgtttacgtgcgatgcccgcgttaactattccgctaacacacaatgcgctaaacgatcttgctgtccgtggtgcggcgctggatatgcgggcatttcggatccacaaccgacgaacaacgttgtgggcaccagccgatagcaccctacaacgcgtagcgcgttacaccatgatcttgctgatgctgacagaattcggagcgtggatatggttacgttagaacagttccgttattgcccgacacactcaacgcatcctccgttctgttatgactttcactatgtcaaaccggggatggtcgccatctttggtgacaacggcagtggcaaaagtacgctggcacagctgatggcgggctggtatccggactttctgccaggagagataacaggcacggggacgctcctcggtacgcccattgggcatctcccgcttaatgaacaatccgccaccatccagctcgtccagcaatcgccctatttgcagctctccggctgtacctttagcgtggaagaagaagttgcctttgggccagaaaatctgtgtcttgctgaagcagagattatggcgcggattgatgccgccctgactctgaccgagtgccagccgttgcgccatcgtcacccggcaacactctccggtggagagacacagcgcgtggtcatcgcctgcgccatcgcgatgcagccaaagctattaattcttgatgaagcctttagccgcctgacgccgcaggccagcgaaatgctgttgcagcgcttacaacactgggcgtttgaacgtggttcgctgattattctttttgaacgtcatcgcacacctttcctgaactactgccagcaagcgtggcaattgcaaaacggagcgctccagccactatgttaacgttaaatcagatatcttatcgctggcctggcgcggcaacggattgtctttgcgacatttctctgcaactcaaacaaggtgaatggttggcgttgaccggcgacaatggcgcagggaaatcgacgctgttacgagtaatggcaggtcttcttacgcccacagccggtacggttatgctgcaacaacaggcgatgaaaaacctgaaaaaccgccagcgcgcggcaaagattggcgtactgtttcaggaagcggaaaaccaactttttcacagcaccgtcgctgac

SEQ ID NO: 1482 - DNA, 780 bp, Escherichia coli
  Strain O55:H7
  modified_base (417)..(417): a, c, g or t
cgcatttggtttgaaactgcaaaaatgcccggcggatgaaatcactcaacgtacccatgctgccctgcaatgttgtcagttagcagacactgccagcgcgcacccgttggatctgcatagtgcgcagcgacggatggtcgccgtcgcctgcctggaagcactctctccgccactattgctgctggacgagccgagtcgggattttgacgaaaattggttgagcgtgtttgaaagctggctggagaagtgccgccagcgaggcacgagcgtcgtagcaatcagtcatgacgccgcatttacccggcgtcatttctctcgtgtggtgcgactggaagatggtctaatcaggaacattaatccaccagacgatattcacccgtagcggtcatcattaaggtcaaatttgcaggcagactntcttccagcacccggcgaacattcggcccgtcggtacggtcataaaaagcttctgcgtctgccagcgataaccctcccgccagcttgcgccccaccagtcgttcccgcaacgcagtagctggcgcattgataaagatcgagaaatcacaaaattgcgctagctggcgccagttatcgtcatccagcaatagccagtttccttcgacgatgattattggtgcggtaacgtgcaacgcatcttcaacaggatcatgcttttgtcgatcgtactgcggccacgtacaatccccttccacgacctggcgcagattttccgccagtttcgcaacgtcaaatgtctctggtgcgcctttgaaggggcgc

SEQ ID NO: 1483 - DNA, 6529 bp, Escherichia coli
  Strain O55:H7
  modified_base (1782)..(1782): a, c, g or t
  modified_base (3077)..(3077): a, c, g or t
  modified_base (3104)..(3104): a, c, g or t
  modified_base (3178)..(3178): a, c, g or t
  modified_base (3199)..(3199): a, c, g or t
  modified_base (4951)..(4954): a, c, g or t
  modified_base (5393)..(5393): a, c, g or t
gcgcatccagccagctattgtaatggtgaaaaccatccatcgggagcgtctgaatagcgggcagctccgggtcttgttgcgcgagatatgccctgaaggtggttagggtagatttacccgtccccggcggagcgcaaagaaaaaccacggttcggcgctgcggatttaccgtctgtaaggccgccagcatacgcagcaacggtttatgcacgcgttctatctcttcatcatggtactgcgcttgcacgttcagcccattcaccgttaattcaattttcacggcgttaattcctttaaggtggtcgttactgccagcgtcagcgccgttttgaccattccgctaaaacgcgcctctgaccagacggcgaaatcggcgaacttcatcgctttcaacgcgtcatagagcgtcgcattgcaggttatgctattgacgttgctgataaaatcccaagtcatgtcatcggcaaatccgagcgtttcatcctgttctttcaggtaatgccagtactgggaaaaatgcgtgatatcggcgtacagccatttatccattttccccagcgcataaatcaaacgcagtgcaacatcaatatcgtcaagcgggccgctttgggcgagtaacggcttcactgcatattcgacgctctcttcatcgttatcgacaaacagcgacggcagaaactggcgtatcccctggagcaaaatagaatgcgcagttttcataaatgaaaataaattgtcctgtgcatccagttgctcaagcacatcatcttctgtcagcgtcgccattggtcttccgatagatcaccatcaatacagggagtctattatattacacgtttggtccgcgccgccgatcagtaatgtctgcgtccgcactccattcgccgtctgttggataccgttcaccaactcgccgcccgtgacgcccgtagcgctaaagaggatatcgttcccccttaccagtacatcgagcgagtacacacggttaacgtcaacacccattgccttgcaacgcttgcgctcctgctctgcaatctgccgattttccgtgtaatcccctttggcctgacaaaagtcaatcagctcggcctgcatattcccgcctaatgctttaacggcacaggcagaaatcacgccttccggcgcaccgccgatggtgtacatcacatcgtaaggattatcctgccagcaggtcagcacgctggcggcgacatcgccatccggcagggcaaaaaccttcacgcccagctgtgttgcttcttcaatcgcggcactcagacgcggtttatccagcgtaaccatgcgcagcttgtccagcggtttacctaacgcccgcgccacgtcacgcaagttgtccgccagaggcaaagacagatcaatcgccccggcagccagtcgattaacaaccagctttttcatatacatatcgggcgcatgtaacaggctatctcgaggggcgaaagccatgaccgccagcgcattgctctgccccatcgccaccatccgcgtgccttcaatgggatcaaccgcgatatcgacttctggcccatcgcctttgcccacctcttcgccaatccacagcatcggcgcatggtcaatttctccttcgccgataaccactcgtccacgaaaagcgacgtcgtttaatgcctggcgcatcgcggtgaccgccaggccatcaattttatttttgtcgccacatccggtttgcggccaggcagccaacgctgcctgttccgtaacgcgaaataatggccacgccagggacatcattgcgcggcntccccgatatcaacgccaaattgtgccagcagatatttctcggcctgttcattccagatgccgtgcgtttcctcaaccagccgcgccaactctttaaacagcggatcggttttgcctttttcggcaaaatcggcaatggctgtgagcggcatagtcacgccgttataaatgagttttttaccgccagggatatccggcagattgagcacggtttctggcaccgcatccaggccaccgatatgggtcaccataaacgacggctgtaactgccctgtggcgctaagggcaatcgcctctttcatgtcgtccgttgaaccgccggatgtaccgacgacgtgcgtgctgttgtaatgaacgttgtagaaattaaacggcactttgaagtttttatccgtcggcccggcaaagaagttcagacagccatcttccgccagtaattcatcagccatctcaacgacagcagacaccgccgcataaacaaaaatgtcatcgaacccggcatctcctgtcagcgcccgcagcatctggacaggatcgctcatccctttggtattcacatacaccagctcaatgcctttactggccgccagttccaccggcagcagcttctgtacctgcgccagacgtttgtcgtcgatatcgaccaccaccacccgcgacggttgtatgccgccgttaatggcgtaatcgatagcgccaatgcccatcggacctgcacacgccagcagtgcaatattgccgccaggtttgacgcccatgcgatgctcataaacatattgcgtggtgtgataattggcatgataagcgccaataatgcagcacataggctctgccagcgacgccgcagcaaaataagagccgtgatacggtaatacgcagcccaaattaatggcgatttcgggaataatcatataagtggcattgccgccaaaatattcgtagctgtagcccgctgaatatccgcttggtaaccccatcgccggttgcaatacaaaacgctggccttttttatatttgccagtgagatttttacccacttcgacaataaccccggcacattcatgcccggtaatgaccggatgattttctaaatcgtcgggtacgcgtttatgttcactaccgagtaacgccgctttccaggtggataaacagacgctgtcagaaatcacactcaccagtaattcattatcggtaatttctggcagttcaaattcgcgcagacggacatcccgcttgccataaatagcagcaactttggttttcatttttacctctgtaatcagtgtttatgttcngcggttaattgattaaataaagtgtcnagttttggatcgccaatatagttattaatcaatatcagtggtttatccgtcacacgtttcacgcgcccttccanactggcatgagtaacgacganatccgcatccgcaggcacgttttctatggcgtaatgttttacttcaattgccagccccgctttttccaggcgtttacggaaggtggtcgcgcccatcgcactggagcccatccccgcatcgcaaacaaaggcgatacgcttaaccctgcttaacgagaatgcaccctcttgtttcatcgccttaaccgcattggctgactgagcaaactcatcttcgctctccgtttccaccgttttttccatcttcagtatcagcgaagtgatagcaaaggacaccagggtacctaccgtaacaccggcaattgtcgccaggaacgaacctttcggcgtcagcgccaggtaagcaaagatagaccccggacttgggccagccaccagaccaccgtccagtaagttaaacatccaggtgccagacataccgcccgcaatcatggcaataatagtcagcggcttcatcagcacatatgggaaatacagttcgtggatcccaccgaggaagtgaataatcatcgccccgggcgcagaacgtttactcatccctttaccaaacaaggtaaacgccagcagcagccccaggcccggacctgggttagaggccaccataaagaagatggatttaccgttaaccgaagcctgttgcattcccagcggataatagacgccctgatcgatcgcattattaaggaaaagcactttcgccggttcattgatgactgacagcagaggcagataacccgcatgtaccagcgcctcaatacactctttgacgaaagtattggcaattaacaccgccgggccgatcacttcaaaacccagcaggcaaaggagcatccccgcgatacctaatgagaagttattgataaccatctcaaaaccggcaggtatgcgtttttccagtgccttatcaacatattttatgaccagaccaccgagcggccccataatcattgagccaaggaacatcgggatctctgcgccgacgatcacaccaatagtacctattccgcccatgaccgcgccgcgtttaccgccgaccagatgaccaccggtagaaccaatcatcacgggcaataaataggtaatcatcgggccgacaattttggcgaaatgttcgttaggcagccaaccggtgggaataaataacgcagtaataaaaccccaggcaataaaagcaccaatattggggatgaccattgcagtcaaaaagcccccaaaagcctggacctttgcacgagcagacttgttttccataatattatcctgtagaggagagagtaattatccgcggctgataatgtccgctaattgtttttctgatgatgctgttaagagttgttcgagtatttcttcttcgcacagtaattcacttaacgcctgaatagcgccaatgtgcgaatcggcatcggcagcagagagtccgatgagtaatttaattggttcgtcattccccggaaaataaacaccttgttcaagtaatgtcaaagacatcccggttttaagcgccccacattccggtcgcgcatgaggcattgccacgcctggtgcgagaatataataagggccattgttaatggtggaatctttaattgcctgaatgtaattctcgctgatatagtttttatccagcaatgataccatcgagaaatcgatagcttcctgccaatcttttgctgaatgtataactgagattgatgattctggaaaatagtcactaagccgcataaattatccttattttatttttagggtacnnnncggcggtaaaaataaaatactcgtgcggtttaatgaaagcaattgagcagggaaaccggtgttttgaaaacagtgaattattaatttcttatataacattgagttatagatataacaacaaatgtcaacacgcatatcgtgatgcatattacataattgatatttattgcatataaatatttgtgatctacaacacgctttatctattgcttgtccgcaaacggacatatcaaggtaataaaaaaggtcgccgaagcgacctttttacccgaaatgctagttacagcagttcttttgctttcgcaacgacgttgtcgacggtgaagccgaactcttcgaacagcaactctgccggagctgactcaccgaaggtggtcataccgatgatagcgccattcaggccaacatacttgtaccagtagtcagcaatacccgcttntaccgcaacgcgtgcagtaaccgctttcggcagtacggattcacggtaagccgcatcctgcttgtcgaatgcatcggtagacggcatggaaaccacgcgcgccttcacgccttcggcagtcagtttttcgtaggcggcaacagccagttcaacttccgaaccggtcgcgatgaagatcagttccggctgaccagcacagtctttcagcacataaccaccgcgcgcgatgtttgccagttgctcttcagtacgttcctgctgcgccaggttctgacgggagaggataagcgcggtcggaccgtcctgacgctcaacaccgtatttccacgcgaccgcggattcaacctggtcacacggacgccatgtagacatgttcggggtcacgcgcagagaagcaacctgctcaaccggctggtgagtcgggccatcttcgcccagaccgatggagtcgtgggtgtaaaccataacctgacgctgtttcatcagcgcagccatacgtacggcgttacgtgcgtattcgacaaacatcaggaaggtggaggtgtacggcaggaagccaccgtgcagggagataccgttagcaatcgcggtcataccgaactcgcgaacaccgtagtggatgtagttacccgcagcatcttcgttgattgctttagaaccagaccacagggtcaggttagacggtgccaggtcagcggagccgccgaggaattccggcaacagcgggccgaacgcttcgatagcattctgagacgctttacggctggcgattttcgccggattagcctgcagtttagcgataaactctttcgctttggcgtcgaagtcagacggcatttcgcctttcatacggcgggtaaattcagccgcttcctgcggataagctttcgcgtaagccgcaaacttctcattccatgcagattctttcgcctggcctgcttctttcgcatcccactgcgcatagatttcagacgggatttcgaacggtgcgtatttccagcccagctgttcgcgggtcagagcgatttctgcatcacccagcggcgcaccgtgggagtcgtgagtaccggctttgttcggggaaccgaaaccgatgatggttttgcacatcagcagggacggtttgtcagtcactg

SEQ ID NO: 1484 - DNA, 4654 bp, Escherichia coli
  Strain O55:H7
  modified_base (1854)..(1854): a, c, g or t
gcttcttctactgcgcgtttgatggatgctgcgtcatgaccgtcgatgtcgcgaataacgtgccagccgtaagcttcgaaacgcattgcggtgtcgtcggtgaaccagccttcaacgtgaccatcgatagaaataccgttgtcatcgtagaacgcaatcagtttacccagcttcagcgtacccgccagagagcaaacttcgtgggagatgccttccatcatgcagccgtcgcccatgaaggcgtaggtgtagtggtcgacaatgtcgtggcccggacggttaaactgcgccgccagcgttttttctgcaatcgccatacctactgcgttggcaataccctgccccagcggaccggtggtggtttccacaccagcggtgtaacccacttccgggtggcccggagttttagagtgcagctgacggaagtttttcagttcttccatcggcagatcgtaaccggtgaggtgcagcaggctgtagatcagcatggagccgtggccgttggacagcacgaagcggtcacggtcagcccaggacggattctgcgggttatgtttcaggaaatcacgccacaggacttcggcaatgtcagccatacccataggggcacccgggtgaccggatttggctttctgtactgcgtccatgctcagcgcacgaatagcattggcaagctctttacgtgaggacattttgactccagatcggatgatgaagggcacgcccttaacgacttgacgacagcgcgttttgggctacgccggaaaatttgccaacaatttaccgcaagccgcgcgtcatgtacatggaacatccttttgccgcttcagaaatctctggatcatgctcgcatgttgcgcaatctactcgcccgtccgctgcgcttttccttatactgagactgagcgtcggttcacctgcaaacggcgcatttttagaataatcctgaccttgtgcggaagaaaaaacatgaaaattcgcgccttattggtagcaatgagcgtggcaacggtactgaccggttgccagaatatggactccaacggactgctctcatcaggagcggaagcttttcaggcttacagtttgagtgatgcgcaggtgaaaaccctgagcgatcaggcatgtcaggagatggacagcaaggcgacgattgcgccagccaatagcgaatacgctaaacgtctgacaactattgccaatgcgctaggcaacaatatcaacggtcagccggtaaattacaaagtgtatatggcgaaggatgtgaacgcctttgcaatggctaacggctgtatccgtgtctatagcgggctgatggatatgatgacggataacgaagtcgaagcggtgatcggtcacgaaatggggcacgtggcattaggccatgtgaaaaaaggaatgcaggtggcacttggtacaaatgccgtacgagtagctgcggcctcggcgggcgggattgtcggcagtttatctcaatcacaactcggtgatctgggcgagaaattagttaattcgcaattctcccagcgccaggaagcagaagccgatgattattcttacgatcttctgcgccaacgcggcatcagcccggcaggtcttgccaccagctttgaaaaactggcaaaactggaagaaggtcgccaaagctcaatgtttgacgaccatcctgcatccgccgaacgcgcccagcatattcgcgatcgcatgagcgcggatgggattaagtaaagcctggtggtgtcgaacgtaggtcagataaggcgttcacgccgcatctgacatgaatggcacatttgttaccttgtgcgcattgccggatgcgatgctggcgcatcttatccggcctacgggtgncgaacgtaggtcggataaggcgttcacgccgcatccgacattaatggcacgttttacccgtgcgcatcgcatctggtgcttactcgccctttttcgccgcctgaatatacagcatttccagcgccagcgttgccgctgccagagcggtgatttccgactgatcgtatgccggagccacttccactacgtccatcccaacgatgttgagatctttcaggccgcgtaccagtttaatagcgcgatcggaggtcagaccgccaattaccggcgtaccggttcccggcgcaaatgcaggatccaggcagtcgatatcaaaggtcaggtaaaccggcatatcacccacaatttgtttcacctgggcgataacgtcatccacgctgcgatcgttcacctggcaggcgtccagcacggtaaagccgttgtctttatcaaattcggtacgaataccaatctgcacggaatgattcgggtcgatcagaccttctttcggcgcggtatagaacatggtgccgtggtcaaattcacaaccgttcgcgtaggtatcggtgtgggcgtcaaagtgtaccagcgccattttgccgaaatgcttcgcatgagcacgcagcagcggcagcgtaacaaagtggtcaccaccgaaggagagcatacgcttaccggcagccagcagcttctcggcgtgcgcctgcagcttctcgctcatctcacgggcatcgccgaaagcatataccagatcaccacagtccacgacgttcagacgctcacgcatgtcgaaattccacgggaagcggttgtgttcccaggccagattcgtcgaaacctgacggatagctgccggaccgtggcgtccccccgcacgaccagaagtggccatatcgaacggcacaccagtaatcacccagtcagcatcgctgtcatacggctggaagttcatcggcaggcgtaaaaaaccaaaggcgttggaaaccagtgagttatcgtattgatgacctaaggtgctcatggatggactcctattacaaagtcgatataaaaaaacccttccgcgtcgttaggcccgacgaggaagggttggatttgcgaaacacaagtttgtgctaattatcgccttaaatgggcgaggcatcaagcgaggttgctatttccgacacggtggcggcgcatagccattgttatctgccggaaaggcttgtccagagcacggtggcagcgcgttttgcgcctggccttgtaattcaaaggcggcaaagccgattacaccggtattacgcacatcgccttgcgccgaattggctgcgtaggaatcagcaacgttggcgaactgaaaagccgcttcggtatgtttatctttgcggaatcctttaatcgctaacgaatctccggcattcacaatatagccgttgttattcagcgaaccttgcttgccgttcagcacatccaggccatcaaccgtagcaacgatctcgtagttggtgttacgactgtaattacggacatataattgataattcattccgactctggcatggacaatatagcgtggttcattattagatgaatcataaacacgcgtaataggtagagaattaaaattaccatcgcgaatagcatattccagttcgttaatacgaatgctataaacgcgatcgtagccggaaggaacattagtcgaataactaataacgatcatctccgccggatcgcgccaggctcgctcagcagatacgccctgaaccgttgagtgcacatccccaccccaggcggtgccgacattgcccgatgcactgctattatactgcgcattactggaacaaccggccagcagcacgattaatgccaccaacgcgctgcgtactttccattttttcataaccgttccctctgcatttaattaatgcagcgattgtagggagattatttaataagaaaagcagctaaattatttttaagaatatataaaaagaaagcggaccgatttacgtaaataaatcgacccgccagcagaataatcttaattattcatcttcaagataggtataaccgtacaaacctgcctcgaactcttcaaggaactgttgttgcagttcagcatcaagatcggttttcttcacttgatcacggaactgagttaacagcgttttcggatcgagctgtacatattgcagcatgtccgccacggtatcgccttcgtcagacagttccacttctacactaccgtcagggaagacgaacacgtcaaccgcttcggtatcaccgaacaggttgtgcatgttgccgaggatctcctgatatgcgccgaccataaagaaaccgagcatcggcggattctctggatcgtactccggcataggcattgtcgtggcaataccatcaccatcgatatagtggtcgatagcaccgtcagagtcacaggtaatatccagcagcacagcgcggcgttccggcacttgatccagcccttccagcggcagaaccgggaacaactggtcgatcccccacgcatccggcatcgactggaacagcgagaagttgacgtacattttgtccgccatacgttcctgcagctcgtcgataatcggacgatgagcacggttttgcggatccagctgcttttgcacttcatggcacatgctcaaataaagctgctcagcccatgcacgttcttgcaggctaaaggtgccggaagagtagccgatatgaatgtcgtgcagatccatctgactgtcgtgtaaccattcacgcagagaacggcgagttcccggttcgtgcatctcctgccaggtttcccacatgctttgcagcg

SEQ ID NO: 1485 - DNA, 9263 bp, Escherichia coli
  Strain O55:H7
  modified_base (336)..(339): a, c, g or t
  modified_base (4988)..(4988): a, c, g or t
  modified_base (5947)..(5947): a, c, g or t
  modified_base (6368)..(6368): a, c, g or t
catcttctgcaggcgcggtcggcaccgtgtattcgttacgttccacgccgatgatattagacaccagcacggtgtgatgcgcagtcactgcacgacccgattcggtgattaccgtcggatgcggcagaccgttttcttcacacgcatcaccaatcgcccagatgatgttgttggcatattcattgaggccgtagttcaccgaacagtcggactgcgaacgagtaccttcataatccacgcccagaccgccgccgacgtcgaagcactgaatattgacgcccagcttgtgcagctcaacatagaaacgcgcggattcacgaacgcctgtcgcgatannnngaatattcgccatctgcgaaccgaggtggaagtgcagtagttgcaggctgtcgagacgcccggcttcacgcagggtttcaaccagttgcagtacctgagtcgccgccaggccgaacttcgatttttccccgccggaggactgccatttaccggagccctgcgaagccagacgtgcacgcacgcccagacgaggaacgacattcagacgttctgcttcatccagcacaatggcgatttctgacatcttctcaatgaccagatagaccttgtgccccatcttctcgccaattaatgccaggcggatatattcgcggtctttataaccattgcagacgatgacgctacgggtcatgccagcatgtgccagcactgccatcaactcggctttggaaccggcttccagacccagcggttcgcccgaatgaatcagggactcaatcacgcgacggtgctggttaactttgatcggataaacaaggaagtaatcgccgttatagccgtaggattcccgcgcacgtttgaacgcggcgttaatggaacgcaaacggtgctgcaggatctgtgggaaacagaacagtgcaggcagacgctgaccctgtgcttcacgagttttcactaactgcgcgagatcgacgcgagcttccgggacgtccgggtccgggcacacgctgatgtggcccagctcgttaacatcatagtagttattgccccaccaggcaatattgtaagtacgcagcatcttgctggcttcctgggagctcattgcaacctcctgcatggagcgtagtacaccgtgttcgcccgctgacgaaggcaaacccatagacatgtcgtcagacatagcgaacctcaaattattttattaagtgtaaaacagttaacgactatcgcagcctggaactgcgataacaacccataagcacatggattttccagcagtgaatgctgacgctccaactgcgcaaccggtttctttttcataacattattaagcacataaccgaacgtaagtgtgacagttcggcgaaaccacgagaaaactcttgtttttacaagagcgcccttgttcagtcctcagtaactgtaaccagctcttgaatcctgagaagcgccgagatgggtataacatcggcaggtatgcaaagcagagatgcagagtgcggggaacgaatcttcaccagaacggtgagacaggttaagcagcagacaacggttcattatttcgtatcacctccacggccgcctgttaagacgaacccacaagccaaaactctgatttcaacccggctggaagtggcaacacgaaagaaacgtcgtgtgctttttatttaagccgcgcgccgcgttttataccccacaatggcagaaaattgcaaaagataaatacgcagaatgccggcattgtcaggaaaaatttccagccacgtttttaacagaatgagacacgattcaaaaaaaagtggaaatcgggtgaagaattgacctaaaatagccatccagatgttaatccatccataccgattaacactcagactgccagtgtttttaacctgcagagtcgtggtaggatccgctaccacagaaaatccacacaacagtttgagctaaccaaattctctttaggtgatattaaatatggcaaaacacctttttacgtccgagtccgtctctgaagggcatcctgacaaaattgctgaccaaatctctgatgccgttttagacgcgatcctcgaacaggatccgaaagcacgcgttgcttgcgaaacctacgtaaaaaccggcatggttttagttggcggcgaaatcaccaccagcgcctgggtagacatcgaagagatcacccgtaacaccgttcgcgaaattggctatgtgcattccgacatgggctttgacgctaactcctgtgcagttctgagcgctatcggcaaacagtctcctgacatcaaccagggcgttgaccgtgccgatccgctggaacagggcgcgggtgaccagggtctgatgtttggctacgcaactaatgaaaccgacgtgctgatgccagcacctatcacctatgcacaccgtctggtacagcgtcaggctgaagtgcgtaaaaacggcactctgccgtggctgcgcccggacgcgaaaagccaggtgactttccagtatgacgacggcaaaatcgttggtatcgatgctgtcgtgctttccactcagcactctgaagagatcgaccagaaatcgctgcaagaagcggtaatggaagagatcatcaagccgattctgcccgctgaatggctgacttctgccaccaaattcttcatcaacccgaccggtcgttttgttatcggtggcccgatgggtgactgcggtctgactggtcgtaaaattatcgttgatacctacggcggcatggcgcgtcacggtggcggtgcattctctggtaaagatccatcaaaagtggaccgttccgcagcctacgcagcacgttatgtcgcgaaaaacatcgttgctgctggcctggccgatcgttgtgaaattcaggtttcctacgcaatcggcgtggctgaaccgacttccatcatggtagaaactttcggtactgagaaagtgccttctgaacaactgactctgctggtacgtgagttcttcgacctgcgcccatacggtctgattcagatgctggatctgctgcacccgatctacaaagaaaccgcagcatacggtcactttggtcgtgaacatttcccgtgggaaaaaaccgacaaagcgcagctgctgcgcgatgctgccggtctgaagtaatctttcttcacctgctttcaaaggccagcctcgcgctggcctttttcttttacctcaccgcggtggataggcgttcacgccgcatccggcaaaaaaaccgcctgcacaataacatcattcttcctgatcacgtttcaccgcaaattatcatcacaactgaaaccgattacaccaaccacaacagacaaagatttgtaatatttccatattattattcggttttcacagttgttacatttcttttcagtaaagtcttaattgcagataacagcgtttaatctatgatgatataactcaattattttcatgcacttaaatcataactaagataaatgttagtgtaagcgattacactgatgtgatttgcttcacatctttttacgtcgtactcacctatcttaattcacaataaaaaataaccatattggagggcatcatgcctgacgctaaaaaacaggggcggtcaaacaaggcaatgacgtttttcgtctgcttccttgccgctctggcgggattactctttggcctggatatcggtgtaattgctggcgcactgccgtttattgcagatgaattccagattacttcgcacacgcaagaatgggtcgtaagctccatgatgttcggtgcggcagtcggtgcggtgggcagcggctggctctcctttaaactcgggcgcaaaaagagcctgatgatcggcgcaattttgtttgttgccggttcgctgttctctgcggctgcgccaaacgttgaagtactgattctttcccgcgttctgctggggctggcggtaggtgtggcctcttataccgcaccactgtacctctctgaaattgcgccggaaaaaattcgcggcagtatgatctcgatgtatcagttaatgatcactatcgggatcctcggtgcttatctttctgataccgccttcagctacaccggtgcatggcgctggatgctgggtgtgattatcatcccggcaattttgctgctgattggtgtcttcttcctgccagacagcccacgttggtttgccgccaaacgccgttttgttgatgccgaacgcgtgctgctacgcctgcgtgacaccagcgcggaagcgaaacgcgaactggatgaaatccgtgaaagtttgcaggttaaacagagtggctgggcgctgtttaaagagaatagcaacttccgccgcgcggtgttccttggcgtactgttacaggtaatgcagcaattcaccgggatgaacgtcatcatgtattacgcgccgaaaatcttcgaactggcgggttataccaacaccaccgagcaaatgtgggggacagtgattgtcggcctgaccaacgtacttgccacctttatcgcaatcggccttgttgaccgctggggacgtaaaccaacgctaacgctgggcttcctggtgatggctgctggtatgggcgtactcggtacaatgatgcatatcggtatccactctccgtcggcgcagtatttcgccatcgccatgctgctgatgtttattgtcggttttgccatgagtgccggtccgctgatttgggtactgtgctccgaaattcagccgctgaaaggccgcgattttggcatcacctgctccaccgccaccaactggattgccaacatgatcgttggcgcaacgttcctgaccatgctcaacacgctgggcaacgctaataccttctgggtttacgcgggtctgaacgtcctgtttatcctgctgacactgtggctggtgccagaaaccaaacacgtttcgctggaacatattgaacgtaatctgatgaaaggtcgtaaactgcgcgaaatcggcgctcacgattaatctccccaggcttcctcccgtcgtggangaagccacctcttgcagtcatcttttcttcgctctatcctctgccgctatgaaaacatcccgtctccctatcgccatccagcaggccgttatgcgtcgcctgcgggaaaaactcgcccaggccaacctgaaattggggcgtaactacccggagccaaaactctcttacacccagcgcggaacctctgccggaacagcctggctggaaagctatgaaattcgccttaatcccgttttgctgttggaaaacagtgaagcctttattgaagaagtggtgccgcacgaactggcacatttgctggtatggaaacattttggccgcgtagcaccacatggcaaagagtggaagtggatgatggaaagtgtgctgggcgttccagcccgccgtacgcatcagttcgaactgcaatccgtgcgccgcaacaccttcccctaccgctgtaagtgtcaggaacatcagcttaccgtacgccgtcataatcgcgtagttcgtggcgaagccgtctatcgctgtgttcactgcggcgaacaactggtcgcaaaataaccatctgaactatcaggaactttcctgatctggctgattgcataccaaaacaactttcgctacgttgctggctcgttttaacacggagtaagtgatgtaccgttatttgtctattgctgcggtggtactgagcgcagcattttccggcccggcgttggccgaaggtatcaatagtttttctcaggcgaaagccgcggcggtaaaagtccacgctgacgcgcccggtacgttttattgcggatgtaaaattaactggcagggcaaaaaaggcgttgtcgatctgcaatcgtgcggctatcaggtgcgcaaaaatgaaaaccgcgccagccgcgtagagtgggaacacgtcgttcccgcctggcaattcggtcaccagcgccagtgctggcaggacggtggacgtaaaaattgcnccaaagatccggtctatcgcaagatggaaagcgatatgcataacctgcaaccgtcagtcggcgaggtgaatggcgatcgcggcaactttatgtacagccagtggaatggcggtgaaggccagtacggtcaatgcgccatgaaggtcgatttcaaagaaaaagctgccgaaccaccagcgcgtgcacgcggtgccattgcgcgcacctacttctatatgcgtgaccattacaacctgacactctctcgccagcaaacgcagctgttcaacgcatgggacaagatgtatccggttaccgactgggagtgcgagcgcgatgaacgcatcgcgaaggtacagggcaatcataacccgtatgtgcaacgcgcttgccaggcgcgaaagagctaacctacactagcgggattctttttgttaacccntaccccacgcgtacaaccgcgtggggagacgacgcggatttttaactatgcgtatcccccgcatttatcatcctgaaccactgaccagccattctcacatcgcgctttgcgaagatgccgccaaccatattgggcgcgtactgcgtatggggccgggacaggcgttgcaattgtttgacggcagcaaccaggtctttgacgccgaaattaccagcgccagcaaaaaaagcgtggaagtgaaggtgctggaaggccagatcgacgatcgcgaatctccgctgcatattcacctcggtcaggtgatgtcgcgtggtgaaaaaatggaatttacgatccagaaatcgatcgaactcggtgtaagcctcattacgccacttttttctgagcgctgcggcgttaaactggatagtgaacgtctgaacaagaagctccagcagtggcagaagattgcaattgctgcctgtgagcagtgtggtcgtaaccgggtgccggaaatccgtccagcgatggatctggaagcctggtgtgcagagcaggatgaaggactgaaactgaatcttcacccgcgcgccagtaacagcatcaatacgttgcctttaccggttgaacgcgtccgcctgctgattggcccggaaggcggtttatcggcagatgaaattgccatgactgcccgctatcaatttactgatatcctgttgggacctcgcgttttgcgtacagagacaactgcgctcaccgccattaccgcgctacaagtacgatttggcgatttgggctaacggagaagaataatgatcaagctcggcatcgtgatggaccccatcgcaaacatcaacatcaagaaagattccagtttcgctatgttgctggaagcacagcgtcgtggttacgaacttcactatatggagatgggcgatctgtatctgaacaatggcgaagcccgcgcccatacccgcacgctgaacgtgaaacagaactacgaagagtggttttcattcgtcggtgaacaggatctgccgctggccgatctcgatgtgatcctgatgcgtaaagacccgccgtttgataccgagtttatctacgcgacctatattctggaacgtgccgaagagaaagggacgctgatcgttaacaagccgcagagcctgcgcgactgtaacgagaaactgtttaccgcctggttctctgacttaacgccagaaacgctggttacgcgcaataaagcgcagctaaaagcgttctgggagaaacacagcgacatcattcttaagccgctggacggtatgggcggcgcgtcgattttccgcgtgaaagaaggcgatccaaacctcggcgtcattgccgaaaccttgaccgaacacggcactcgctactgcatggcacaaaattatctgccagccattaaagatggcgacaaacgcgtgctggtggtggacggcgaaccagtaccgtactgcctggcgcgtattccgcaggggggcgaaacccgtggcaatctggctgccggtggtcgcggtgaacctcgtccgctgacggaaagtgactggaaaatcgcccgtcagatcgggccgacgctgaaagaaaaagggctgatttttgttggtctggatatcatcggcgaccgtctgactgaaattaacgtcaccagcccaacctgtattcgtgagattgaagcagagtttccggtgtcgatcaccggaatgttaatggatgccatcgaagcacgtttacagcagtagtaacccaccttagcgagaaggatctcgttgagactctgagtgacagcgcccttctttccacgcatactgggcgctgttgcttttttgaaccaggaaacagaacctctgacaatgaatttacagcatcactttcttattgccatgcctgctctccaggatccgattttccgtcgttccgtggtctacatttgcgaacataataccaatggtgcaatggggatcatcgtcaacaagccgctggaaaatctcaaaattgaagggattctggaaaagctgaagatcacgccggagccgcgtgatgaatcaatccgtctggataaaccggttatgctcggcggcccactggctgaagatcgcgggtttattttgcatactccgccctccaattttgcttccagcattcgcatttcagacaacacagtgatgaccacttcccgcgatgtgctggaaacgctcggcaccgataaacaaccgtctgacgtattggtggctctgggctatgcctcctgggaaaaaggtcaactggaacaagaaattctcgataacgcgtggctaaccgccccggcagatctgaatattctgttcaaaacgccaattgccgaccgctggcgcgaggcggcaaaactgattggtgtggatattctcaccatgcctggtgtggcaggacacgcctgatgagtggaaccttactcgccttcgacttcggcaccaaaagcattggcgtagcggtcggccaacgcattaccggcaccgctcgccctttgcctgcaattaaagcacaggacggtacgccggactggaacctcatcgaacgtttactgaaagagtggcagccagacgaaatcatcgtcggtttaccgctgaatatggacggcaccgaacagccgttaaccgccagagcgcgtaaatttgctaaccgtattcatggtcgtttcggtgttgaagtaaagctccatgacgagcgtcttagcaccgtggaggcacgttccggtctgtttgaacagggcggctatcgggcgctcaacaaaggcaaaatcgactctgcctctgcggttattattctcgaaagctatttcgagcagggatattaaggagatttaatcgcctgctggagtgtaaataatatcatcgcgccttacgccttattgccggattg

SEQ ID NO: 1486 - DNA, 67 bp, Escherichia coli
  Strain O55:H7
  modified_base (63)..(66): a, c, g or t
tgaacgccttatccggcctacatgtggcagcggttgtaggtctgataagacgcgcaagcgtcnnnnt

SEQ ID NO: 1487 - DNA, 27559 bp, Escherichia coli
  Strain O55:H7
  modified_base (306)..(306): a, c, g or t
  modified_base (3242)..(3242): a, c, g or t
  modified_base (5711)..(5711): a, c, g or t
  modified_base (7113)..(7113): a, c, g or t
  modified_base (8348)..(8348): a, c, g or t
  modified_base (11286)..(11286): a, c, g or t
  modified_base (11491)..(11491): a, c, g or t
  modified_base (11722)..(11722): a, c, g or t
  modified_base (12277)..(12280): a, c, g or t
  modified_base (13218)..(13218): a, c, g or t
  modified_base (15305)..(15307): a, c, g or t
  modified_base (18060)..(18060): a, c, g or t
  modified_base (19691)..(19691): a, c, g or t
  modified_base (21358)..(21359): a, c, g or t
  modified_base (22782)..(22785): a, c, g or t
  modified_base (23550)..(23550): a, c, g or t
  modified_base (25119)..(25119): a, c, g or t
  modified_base (25679)..(25679): a, c, g or t
  modified_base (26339)..(26339): a, c, g or t
acgtttattgcctttgtaggcccgataagcttgcgcatcgggcatggcaacgtcacaaacgcccttcccccacccgctgctgataactctgctgaaacgttatcatccccacctgttgcccagtttgaataacatgcggtaactggtgggttttcccttcgcgaatcaaattccccaccgcgggtgtgttaatcagcaattcaaatagcgccacgcgtccttcctgtttatccacttccagcttttgtgacagcactgcccgtaaactacctgccagttgattacgcacggggtctttttcctgcnccggaaatgaatccacaagtcgctcaactgcctgcgcggcaccacgtgtatgtaaggttgccagcaccagatgcccggtttctgccgccgtcagcgccagacggattgtctcgctgtcacgcagctctccgagcaaaatcacatcaggatcttcccgcaatgcggcccgcaatcccgatgcgaacgtcatacaatgcaaaccgatttcccgctgctggatcaaacatcgctggctggcatagagatattccacaggatcttccagcgtcagaatatgcgcatcagcatgttgattgagataaccaaccatcgccgccagcgtggtagatttgccactccccgtcgcccccgtcaccagaatcaagccattctcgctcttgagtaactccggcaatatcggtggtgtgccaagctgttcgagctgcgggcagtgcgaaggtaacagccgtaacgccagcgaaatgccatgccgttgcgcgaatgcgctgccacgcaatcgctggttttccgtcagcgacacggcaaaatccagctgaccattctccagcaatattgcccgctgatcgtcatccagccactcccgcagtagctcttcgacgtccggcgcatcaaacggcgcagcttccattagcccgcgaatgcgccatcgtgcgggccaggcgctgcacaggtgtagatccgagacgttatgctttacactaagggccacaatttcttccatattcatactaagatcctcggaaaatgaacgatattgcgcataacctggcacaggtccgggacaaaatctcagcggctgcaacgcgttgcggccgttctccagaagaaattacgctgcttgcagtcagtaaaacaaaacctgcgagcgccatcgcagaagccattgatgccgggcagcgtcaatttggtgaaaactacgttcaggaaggggtagataaaattcgccactttcaggaactgggcgtaacaggattagaatggcattttattggcccgttgcagtctaataaaagccgcctggtggcagagcatttcgactggtgtcataccatcgaccgtttgcgcattgctacccgcctcaacgatcagcgcccggcagaacttccccctcttaacgtactgattcaaattaatattagtgatgaaaacagtaagtccgggattcaactggcagaactggacgagctggcagctgcggtcgctgaactaccgcgtttacgtctgcgcgggctgatggcaatccctgcgcctgagtcagaatatgtaaggcagtttgaagttgcacgccaaatggctgtagcatttgccggactgaaaacgcgctacccgcatatcgacacgctctctctgggaatgtcggacgatatggaagccgccattgcggcaggtagcacgatggttcgtatcggcactgcaatttttggtgcgcgtgattactctaaaaaataaggaattaaaggaacgccatgaatacgttgactttcctgctttcaacggtcattgagctgtataccatggtgctgttattacgcatctggatgcagtgggctcattgtgatttttacaaccccttctcacagtttgtagtgaaggtaacgcagccaattatcgggccactgcgccgcgttattccggcaatgggacccattgatagcgcctcgctgctggttgcctatattctcagttttatcaaagccatcgtgctgtttaaagtggtgaccttcctgccaatcatctggattgccggtttactgattctgctgaaaaccatcggcctgctgattttctgggtcctgctggtgatggcgattatgagctgggtaagccagggccgtagcccgattgaatacgtgctgattcagctggccgatccgctgctgcgcccgattcgccgcttgctaccggcaatgggggggattgatttctcgccgatgatcctcgttctgctgctgtatgtcatcaatatgggtgtcgcagaagtattacaggcgaccggaaatatgctgctgccggggctgtggatggcgttatgagtgccgtaacagttaacgatgacggtctggttttacggctctatattcagccgaaagccagccgtgattctattgtcggtttacatggcgacgaggtaaaagtcgccattaccgcgccgccggttgacggtcaggccaacagccatctggtgaagtttctcggtaagcaattccgggttgccaaaagccaggtggtgattgaaaaaggcgaacttggccgccacaaacaaattaaaatcattaatccgcaacaaatcccgccagaagtcgcggcgttaattaattaggtatcctatgcaaaaagttgtcctcgcaaccggcaatgccggtaaagtgcgtgagctggcgtcgctgcttagcgacttcggtcttgatatcgtggcccaaacagaactcggcgttgattccgctgaagaaaccggcctgacctttatcgaaaacgcgattctgaaagcgcgccacgcggcaaaagtgaccggtttaccggcaattgccgacgactctggcctggcggtagatgtgcttggcggcgcgccgggtatttactccgcacgttattccggtgaagacgcgaccgatcaaaagaatctgcaaaaactgctggaaacactgaaagacgtaccggacgaccaacgtcaggcgcgtttccactgcgtgctggtgtatctgcgtcacgcagaagatccgaccccgctggtgtgccatggcagctggccgggtgtgattactcgcgaaccggcgggcactggtggctttggttatgatccaatcttcttcgtaccttccgaagggaaaaccgctgccgaactgacccgcgaagaaaagagcgccatttcccaccgtggtcaggcattgaaactgctgctggacgctttacgtaatggttaaattaccgccgctgantctctacattcacatcccgtggtgcgtgcagaaatgcccgtactgcgatttcaactctcacgcgttgaaaggagaagtgccgcacgacgattacgttcagcatctgcttaacgatctggacaacgatgtggcttacgctcagggccgtgaagtaaagacaatctttattggcggtggtacgccgagcctgctttccggctcggcgatgcaaacgctgctggacggcgtgcgtgcgcgtttgccgctggcagcggatgcagaaattaccatggaagcgaaccccggtacggtagaagccgatcgctttgttgattatcagcgtgccggtgtaaatcgtatctctattggggtacagagttttagcgaagaaaagctgaaacggctgggacgtattcatggcccgcaagaagcgaaacgagcggcaaagctggcgagcggtttagggttacgtagctttaaccttgatttgatgcatgggctaccggatcaatcgctggaagaggcgcttggcgatctgcgccaggctattgaactgaatccgccgcatctttcctggtatcaactgaccatcgaacctaatacgctgtttggttcacgcccgccggtactgccggacgacgacgcgctgtgggatattttcgaacaggggcatcagttattaaccgcagcgggttatcagcaatatgaaacttccgcttacgccaaacccggttatcagtgccagcacaatctcaactactggcgctttggtgactacatcggtattggctgcggcgcgcacggcaaagtgaccttcccggatgggcgcattctgcgtaccaccaaaacgcgtcatccgcgtggttttatgcaaggaaggtatctggaaagccagcgtgatgtcgaagccgcagataagccgtttgagttctttatgaatcgcttccggttgctggaacctgcgccgcgcgtggagtttagtgcgtataccgggctttgcgaagatgtgattcgcccacagttagacgaggcgattgcccagggttatctcaccgaatgtgcggattactggcagattacggaacatgggaagctgtttttaaattcgctgctggagctttttctggctgagtaaacttgtattgccggatgcggcgtgagcacctcagccgacatgtggcagctgttgtaggtctgataagacgcgctagcgtcgcatcagacgttgattgccggatgcggggtcaacgccgcatcctgctacaaatcgtgcgctatatcaaaacttacttaatcaccccattgcgccgcagttgttcggtatcttttttccagcgttcattagcctggttgatatcgtcaattttcatcaaaatcgcgacttttttactgtttatttctgaaactttcatcgttaacggatattgccctttttcgagcgttatccagtcatcctgcaatttacggctaagtttttgtgattgcagaaaagtctgtcgccgttgttcgttgatatcgaaatctcgtttctgctgaatcggcacttcataacactcttcactctgtttatgacatgccgcaatcgccggttgataaacctctttgtcatatttaaccgcgaacgcctcgctatcgttctgtttattaaactcatcacgctgttggtgaatttttttaaaggcatcttcgcgggtcatttgcttaccatttgcatcttttccccaatatgcatccgctgctttctgcgccgccaccatttgcttatcaagcgctttcacttccttttccagcgcaggaatcgagttcttctgggtattcaacgcagtctcaagctgactaaagcgataattgaaatcttcgctattcacgatcagatatttattattcgttttgatatcgtcgaccacccgaccacgatcgctagctgccgcctgaaaagagtaaaagttcaccgtccagccagacgcgggcgttcctttactggttaacatcgccgagaattttaccggtttatctttcgtccaggtctgttcgagcagttcgtaatctgccaactgaccgacccaggtatagagatcgtcactggaagagacatcgccttccgctgaccaggtggcctgattacccttagcatcaagattttttaaggtgatggcatcaagcttgagaatgccgtgatactgctttttgaattgatcttttaagatattttcagttggcggttcgccatctgcccagacattaccagtcatcaacataagcagcgccgtgccaacaatccattgctttttcacccgaaaaccctcgcgcggaataatttattctggtgattatcattagggcaattaaaattggcaatggacgtaagtctgaagtgaaaaagccccggcgcgataccggggcgaaatgattagtactgattgaagatctgctggatctgctgcggatctttggtttgcgtcagagccagttgcagcaggacgcgcgctntttgcgggttcagcgtaccagaggcaataaaaccgtatttcgcatcatccacttcggcatcctgagtggtagcgcccgtcggtacgcgggaagaacgcacgactgcagtaccgtttttcgcggcggtcgccagcgtgtcaaacacggatttatacaggttgccgttacccacaccagcgctcacgatgccatcatagcccgcatctaccagggctttagccggaagatcggatgcgttagcgtagttataaacaatgccgactttcggcagttcattcagcttagagacatcgaacggcgtgtcgctggtgtgcttacgtgccggggtacgttggtagtcaatcttaccgttgtgaatgtatcccagcggaccgtagttaacagacttgaaggtcgctacgtcggtggtgttggttttggtgacatcgcgaccgtccagtacggtgtcgttcatcaccaccagcacgccacgattagcggaggctttatcagctgcggtcactaccgcgttatacaggttgaatggaccgtctgcgctcatagacgtggacggacgcattgcgccgaccatcaccaccggtttgtcgcatttcaccgtcaggccgaggaagtaagcggtttcttccatcgtgtcggtaccgtgagtaatgacgaagccgtcggttttatcgcagtcggtgttaatttttttcgccagtgtcagccagacatcatcgttcatgtcctgggagccgatattcactacctgctcgcctttaacgttcgcaatgtccttcagttgcggcaccgcattaaccagattttctacgccaactttacccgctgtgtagttagatttggttgcggagtcaccaccaccggcaatggtcccgccggttgctaaaatggtgatattgggtaatgccaatgctgcaccactaaaacccataaccagtgcggcaagtgccgtctttttgaaaaactccatttcattcctccagttacgtgaacgctacgcattatcccttagctctgtatgggaaatttgacgttaaacaatttacaacgtgaatatattttggagatctacaaagttagaggcaggtaacaaaacgaagaattaaacggcataaaaaagtattatgccgtcttaaaatagaggattattttaaattcccgaccagggctttgcggctatcttccagagtcacaacgcggctacaaacatctttgccaaactgctggaaatctttttcctgctttttccactcggtttggattgaggattgcagcccccccaggcttcccagcacattctgtaatgggttaccgccgcttttcagcaccgctttcgcgcccatttcattaatgctgtcctgtaaaattccgcccattgcctgattcactaattgctggccttcancgcgaacctgatcaatggctttatagtggaacgtcaggccatcgctgcgcgtttcgataatgcggttcatctgctctttcagctgcgcatcaagtttggtcagacggctgcgcattttgctgctttcgcccatctcctgaacgataattttatccagagcaatacgggctttctcgacgcggcttttcgcgccttcatcaatccacggcagcgtgctacgtagttcagcctgataatccttcgcctgctcgcgctgggcggcattcagggaatattgcttaccgttatacatcacgttgccgtctggcgtgatcaccagattgccgttttcgcccttcacctgcacggtttgcgggctgacaatcacatcgtcacgcggcgtgacgctgcactggtagtcggcgtgagcggtcattgccgtcactgaaagtgctgccgccagcagcattttgcgcatcatagtcttccctcaagaacaaatcaggccagcatttgctggccccagattgataacaaagtacgcgttttccatgccggatgcggcgtaaacgccttatcccgcctactcgatcgtgcatctttgtaggcatgataagcgtagcgcatcaggcagttttgcatttgtcatcgcccgtatgctttcttagtcccaccaaacgtcgaaaagttcgctggtgcgtacctcatccaggttgcgctcttccagccacttacgcacaatcgcctgatgttcttcggtgcatttgccgatttcctgcatgcagatcagaccttcccaggccagataaccgctgccgtcaaaggccagtttgttcggttcgataacctcgttaataaaatcatcaacggttttatcaatctgttcttccgatgtaccttccgggaatcgccatgccaccgaaaatcctaattcctggaattcgtcgatgtgcatttttttacgcagacgacggctacggttctttgccattatttcaccctctcgaacattaagtcccatactccgtgaccaagacgatgaccacgttgttcaaatttcgtcaccggacgtgatgccggacgcggtacgtaatcattgctctctgacaggtttttataaccgtcaatagaagacatcacttcaatcatatgttccgcataaggttcccagtcggtcgccatatggaatacgccccccagctgcagtttgctttttaccagttcggcaaacggcacctgaacgatacggcgtttantatggcgcgctttgtgccacgggtcagggaaaaagagctgcaccatgcgcaatgaattgtcaggaatcattttatgcagcacttcaaccgcatcgtgacacatcacgcgcaggttgcttaagccctcttcatgcgcagaagccaggcacgcaccaacgcccggtgaatgcacttcaatgccgaggaagtcctgctcggggcgatctttagccattgccaccagcgacgcccccatgccaaaaccaatctcaagcgtcaccggcgcttcacggccaaaaagcgcggggaaatccagcatatcttcgctgaactcaacgcccatcaccggccagtagttttccagcgcatgttcctggcctttggtcagtcgcccctggcggcgcacaaaactacggatacggcgcagtgggcggccgttttcatcaaattccggtgaaatgacgtcgtttttcataaagatttagtcgcttgtgaaagtgttctgaaaacgggcattatccaaagttagttgccggatgcaagcatgataaggccgtggctgcggaaagttccggtttacaccctgccgtcgctgtgctgcaatcttgcccccaacaacagtgaattcggtgaccatgcaagcgtcgcaattttcagcccaggttctggactggtacgataaatacgggcgaaaaactctgccctggcaaattgacaagacgccctacaaagtatggctctcagaagtgatgttgcaacaaactcaggttgcgaccgttatcccctattttgaacgctttatggcgcgcttcccgacggtgaccgatctcgccaatgcgccgctcgacgaagttctccacttgtggacggggcttggctattacgcccgcgcgcgcaatctgcataaagcggcacaacaagtggcgaccttacacggcggtaaattcccggaaacctttgaggaagttgcagcactgccgggcgtcgggcgttccaccgcaggcgcgattctatcgctttctctgggtaagcactttccgattctcgacggtaacgtcaaacgggtgctggcgcgctgctatgctgtaagcggctggcctgggaaaaaagaggtcgagaataaattatggagtttaagcgagcaggtgacgcccgcggtcggcgtggaacggtttaatcaggcgatgatggatttgggcgcgatgatttgcacgcgttcgaagccgaaatgttcgctctgtccgctacaaaacggatgtattgccgccaccaacaatagctggtcgctttatccgggcaaaaaaccgaaacagacgctgccggagcgcaccggctactttctcctgttacagcacgaagatgaagtattgctggcgcagcgtccgccgagcggattgtggggcggtttatactgtttcccgcagtttgccgacgaagaaagtttgcggcagtggctggcgcaacggcagattgctgccgataacctgacgcagctgaccgcgtttcggcataccttcagccatttccacttagatattgtgcctatgtggcttcccgtgtcgtcattcaccggctgcatggatgaaggcaatgcgctctggtataacttagcgcaaccgccgtcagttggcctggcggctcccgtggagcgtttgttacagcagttacgcactggcgcgccggtttagcgcgtgagtcgataaagaggatgatttatgagcagaacgattttttgtactttcctgcaacgtgaagcagaaggtcaggattttcagctgtaccccggcgaactgggaaaacgcatctataacgagatctccaaagaagcctgggcgcagtggcagcacaaacaaaccatgctgattaatgaaaagaaactcaacatgatgaatgccgagcaccgcaagctgctggagcaggagatggtcaacttcctgttcgagggtaaagaggtgcatatcgagggctatacgccggaagataaaaaataaaaacagtgccggagcacgcctccggcagcttgcataaaaacaaacacaacacgcacccggaatgatgaaaaaatatctcgcgctggctttgattgcgccgttgctcatctcctgttcgacgaccaaaaaaggcggtacctataacgaagcctgggtcaaagacaccaacggttttgatattctgatggggcaatttgcccacaatattgagaacatctggggattcaaagaggtggtgatcgccggtcctaaggactacgtgaaatacaccgatcaatatcagacccgcagccacatcaacttcgatgacggtacgattactatcgaaaccatcgccgggacagaacctgccgcgcatttgcgccgggcaattatcaaaacgttgctgatgggtgacgatccgagttcggtcgatctctattccgacgttgatgatattacaatttcgaaagaacctttcctttacggtcaggtggtggacaacaccgggcagccgattcgctgggaaggtcgcgcaagcaacttcgcggattatctgctgaaaaaccgtctgaagagccgcagcaacgggctgcgtatcatctacagcgtcaccattaacatggtgccgaaccaccttgataaacgtgcacacaaatatctcggcatggtccgccaggcgtcacggaaatatggcgttgatgagtcgctgattctggcaattatgcagactgaatcttcctttaacccgtatgcggtcagccgttccgatgcgctggggttaatgcaggtggtacaacatactgccgggaaagatgtgttccgctcgcaggggaaatccggcacgccgagccgcagtttcttgtttgatcctaccagcaatattgataccggcaccgcgtatctggcgatgctgaacaatgtttatctcggcggaattgataaccctacatcccggcgttatgccgtcatcaccgcctataacggcngcgcaggcagcgtgctgcgagtcttttcgaatgataagattcaggcggctaatattattaacaccatgacgccgggcgatgtttatcaaacgctgacgacccgccatccctctgcggaatctcgccgttatctttataaagtgaataccgcgcaaaaatcctaccgccgccgataattccactaaccgcccctgacgatgctcangggcaaaaatgttatccatatcacaatttcgttttgcaaattaggaatgtttgcaattatttgccacaggtaacaaaaaaccagtccgcgaagttgatagaatcccatcatctcgcacggtcaaatgtgctttttcaaacactcatccgcatcacgatgtgaggaaattaacatgaatcttaagctgcagctgaaaatcctctcttttctgcagttctgtctgtggggaanttggctgacgaccctcggttcctatatgtttgttaccctgaagtttgacggtgcttctattggcgcagtttatagctcactgggtatcgccgcggtctttatgcctgcgctgctggggattgtggccgacaaatggttaagtgcgaaatgggtatatgccatttgccacaccattggcgctatcacgctgttcatggcggcacaggtcacgacgccggaggcgatgttccttgtgatattgattaactcgtttgcttatatgccaacgcttgggttaatcaacaccatctcttactatcgcctgcaaaatgccgggatggatatcgttactgacttcccgccaatccgtatctggggcaccatcggctttatcatggcaatgtgggtggtgagcctgtctggcttcgaattaagccacatgcagctgtatattggcgcagcactttccgccattctggttctgtttaccctgactctgccgcatattccggttgctaaacagcaagcgaatcagagctggacaaccctgctgggcctcgatgcattcgcgctgtnnnnaaacaagcgtatggcaatcttcttcatcttctcaatgctgctgggcgcggaactgcagattaccaacatgttcggtaataccttcctgcacagcttcgacaaagatccgatgtttgccagcagctttattgtgcagcatgcgtcaatcatcatgtcgatttcgcagatctctgaaaccctgttcattctgaccatcccgttcttcttaagccgctacggtattaagaacgtaatgatgatcagtattgtggcgtggatcctgcgttttgcgctgtttgcttacggcgacccgactccgttcggcaccgtactgctggttctgtcgatgattgtttacggctgtgcgttcgacttcttcaacatctctggttcggtgtttgtcgaaaaagaagttagcccggcaattcgcgccagtgcacaagggatgttcctgatgatgactaacggcttcggctgtatcctcggcggcatcgtgagcggtaaagttgttgagatgtacacccaaaacggcattaccgactggcagaccgtatggttgattttcgctggttactccgtggttctggccttcgcgttcatggcgatgttcaaatataaacacgttcgtgtcccgacaggtacacagacggttagccactaattacgcaaagaaaaacgggtcgccagaaggcgacccgttttttttattcttacttcaacacataaccgtacaaccgtttcatgccatccgcatcggtttcgctataaacaccttgcagctccggcgaaaatcccggcaacaaattcaccccttcttccagtgcaaggaaataacgttgaaccgccccaccccagacttccccgggtacaacgcaaagcacgccaggtggataaggcaacgccccttctgccgcaattcgcccttcggcatcacgaatccgcaccaactccacgtcacngcgaatataagcgctatgcgcatcctgggggttcatcaccactgacgggaaactctgctggcggaacatcgctttttgtaggtctttgacgtcgaaactgacatacagatcgtgcatctcctgacacaactggcgcagggtgtagtcgcgatagcgcaccggatatttgttataaacgctcggcaacacctcagccagcggcgagtcatcctcaatatgctgttcaaattgagccagcatcgccaccagttgtgccagcctctcgtggctttccgccggagttaataagaacagaatggaattgagatcgcacttctccggcacaatgccgttctcacgcagatagtgcgccagaatcgtcgccggaacgccaaagtcgctatattcgccggtttcggcatcgatacctggtgtagtgagtaacagcttgcacggatcaacaaaatactgatccgcggcatatccttcaaagccgtgccacttcgcccccggctcaaaactgaaaaaacgacggtcgctggctaacactgatgtcggataatcctgccacaatttgccatcaacaacgggcgggataaacgggcggaacagcttacagcgcgcaagaatagccttgcgcgactcaatacccaactcaacgcactcagcccacagccgacgcccactctccccttcatgaattttggcgttaacatccagtgcagcaaacagcggatagaaagggctggtagaagcatggagcataaaggcgttattcaaccgcttatgcgggcaaaaacgcgcctgtccgcggatatggttatcttttttatggatctgcgacgtctgtgagaatcccgcctgctgtttgtgcaccgactgagtcacaaagatccccggatcgttttcgttaagttctaacagcagcggcgagctatccgccatcatcgggataaattgttcataaccgacccacgcggaatcaaacagaatgtaatcacacagatgcccaacggtatcgatcacctgacgggcgttatagacagtgccgtcataggttcccagctgaataatcgccaggcgaaacgggcgcggcaggtcggctttttctggcgcaacgtcgcgaatttgctggcgcagatactcttcattaaaacagtgcgcatcaataccgccaatgaaaccaaacgggttacgtgaagcttccagatagaccggcgtcgcccccgcctgaatcaacgcgccgtgatgattcgacttatggttgttacggtcaaagagcaccagatcgccacgcgttaacagcgcattcgtcaccactttattcgctgccgatgtgccgttcagcacaaaataggttttatcggcatgaaagactttggctgcgaatttctgcgcatctttcgccgatccttcatgaataagcagatcgcccaattttacgtcagcgttacacatatcggcgcgaaagatgttctcaccaaagaaatcgtaaaaatggcgtccggcaggatgctttttaaagaacgcaccatgttgatgtccagggcaagcaaaggtgctgttgcccatctcaacgtactgcgtcagcgtgtcataaaacggtggcagcaaattctcttcatactgacaggctgcggattccagctccagccactgctgctcgttgccgttgattaccgccgtaacgcccgcaggtaattcaacagcatgttcggaatacaaaaacaccggtagatgaaaaccggtgcgcttaagcaacgtaagaatgccactgcgactatccgcagcggtaatgacgactgccgcgacgtccgtaaaatcagtatctcccaacgccaccacgcggcgatgagtagaaagtcgggataccagttcactactggcggcaatattcattgatttcataagcgcaaacccgtttcggggaagtaagaatactggacaaggtgtaaaaccctgccccatgagatatgggtcaaactggtcaccagctccgaccgccagacatcagtaaaagcagaaaggctctgattttactgttgtcctgcagtgagcgtgcgttaacttcaccgcatgagcagtagcataaaaagagaagggtttcnnncgaaacggcgataagcgagagaatgtaaggagatggcgtgcatcgggcaaactccgtacagagaggagaaaattcgcgcaatcatggcacctttcgctaaggcgtgcaagccaggactttgcgaccagacaagccatcaacaaggcaaaaagttcataataagaaaatcaaacaatacagttaacaggaactcttgtggtcatcggcccttttatcaacgcaagtgcaatattactgggtggcatgctcggtgcactgcttagccaacgcttaccggaacgtatccgcgtctccatgacatcaatttttggtttggcatcgctggggattggtattttactggtggtgaaatgcgccaaccttccggcgatggttttagcaaccttactcggagcattaatcggcgaaatttgtctgctggagaaaggcgtcaatacagcggtcgccaaagcacaaaatctgtttcgtcactcacgtaagaagccagcgcatgaatcttttattcagaattatgtcgcgattattgtcctgttttgcgccagcggcaccgggatcttcggggcgatgaacgaagggatgaccggcgatccgagtattttaatcgccaagtcatttcttgatttctttacggcgatgatcttcgcctgctcgctgggtattgcggtatcggtgattagtatcccattactgatcatccagttaacgctggcgtgggctgccgcgctgatattaccgctgaccacaccgtcgatgatggcagacttcagcgccgtaggcggtttattgctgctggcaaccggattacgcatctgtggcattaaaatgttcccggtggtcaacatgcttccagcactccttctggcaatgccgctttccgccgcctggaccgcctggtttgcctgacaatgtgtgcaatagcggcaaagtgatgatagattgtgcagtctgcagtaaattgaagaaatttgattgacgagacgaggcgaatcaggtttaatgcgccccgttgcccggatagctcagtcggtagagcaggggattgaaaatccccgtgtccttggttcgattccgagtccgggcaccaaattcatatcaacggacctccacggaggtccgtttttcgtttcagaacaccatgatttaagtgttcttcctccaaatcaattctaccgaactcaaccaaattctccccacatcaacctcattgtgtgggtataattgcgggcataccccagttcgacagaatttgtaccctctttaacgcattcagaaggctgaactatggcactgactgacgcaaaaatccgggctgcaaagcccactgacaaggcttataaactcactgacggggctggcatgttcctgctggtacatcctaatggttcccgttactggcgtctccgttatcgtattctgggtaaagagaagactctggcacttgttgtgtatccagaagtatctctctccgaagctcgtacaaaacgggatgaggcccgaaaactgatttcggagggggttgacccttgcgaacagaaaagagctaaaaaagtagtccctgatttacaactctctttcgaacatattgcacgacgctggcatgccagtaataaacaatgggcacaatcacacagcgataaagtactcaaaagcctcgagacacacgtattcccctttatcggcaatcgggatatcacaacactcaataccccggacctgcttatccctgttcgtgctgcagaagctaaacaaatttatgaaatcgccagtcgtctgcagcaaagaatatctgccgtaatgcgttatgccgtacagtctggcatcatcagatataatcctgctctggatatggctggcgcattgactacggtaaaacgccagcatcgccccgctcttgatctttctcgcctgcctgaacttttgtcgcgtattggcagttacaaggggcaacctgtcacccagcttgccgttatgctgaatttactggtttttattcgttccagtgaactcagatacgcccgctggtctgaaattgatattgacaatgccatgtggactattccagccgaacgcgaacctctgccaggcgtaaaattctcacaccggggatccaagatgcgaacaccacatcttgtgccactcagcaaacaggttgtagccatactggcagaacttcagacatgggctggtgaaaatggtctgatctttacgggagcacatgacccacgtaaaccaatcagtgaaaacaccgtaaataaagccctgagggttatggggtatgacacaacccaggatgtctgtggtcatggattccgggcgatggcatgtagtgcgttaatagaatcaggtttgtggtcccgcgatgcagttgaacgtcagatgagccatcaggaacgtaacggtgtacgtgctgcttacattcataaagcagaacatctggaagaacggcgactgatgctacagtggtgggccgattttctggatgcaaacagagaaagatttatcagtccatttgaatatgcaaagattaataatccattaaaacagtaatcatcccgggcaaatgcccgggaacctactccaggattattttctttgttaaaaaaacagacaaaacggtattagcttcgtaagcgtacagcgagggccgtattgacggggatgtgttattcagctggcagtgctatgcgccacggaagcagttcgctgacccggttgaccggccagtctgctatgacgccaagcacatggcgaangtagctttctggatccacgtcattcagtttgcacatcccgatcaggctgtacagtagcgctccccgctcaccaccatggtcagagccgaagaacaggaagtttttacgacccagactgaccgcccgcagggcattttcagcgatgttgttgtcgatttccacccagccatcgttcgcatagtacgtcagtgccggccactggttaagtgcgtacgcgaacgccttcgccaactctgagtgtcgcgacagggtcttcatcttttcacgcaaccagctttccagggatttcaacagcggtttcgtttttcgctgacgttcagcaagccgctgctctgccggcattccccttatatccgcctctatggcgtacaactgaccgatctgctccagggcttcttccgtcagtgctgacgggatgcggacgtgcacatcgtggatctttcggcgggcatgagcccagcaggcagcttccgttatcccaccattgcgatacagctcgttgaacccggcgtacgcatccgcttgcagcacactgtcacgaacggtgcaatagtcatccgtcgttgacaacagctgatactgagggtttccgggtcctctgcgagcgattctggctgttcggcagctgcatcgagagtcacaggaagtagctgggggctctctgaagaaggtaatagcagctttccctcgcgccattgttgtgtaagcgccccatctgcgacgtcttgtgaaaattgtcctgtctggcaacaatcgcgcccatctatatagatggacacgaacgatgaattcccagacaaaaaaagatattccctgcttccgttcttatttgcctgatgctctgcgtttaagatttgaagataaactgaccatccgggccatcgctcagcgtctaggtctcagtcattccacaatacatacgctttttcagcgatttattgcatccggtatcgcatggccattgcccgattcagtttcattagctcagcttgacgccatcctttatgccaacagaaagaaggaattaacagagcctcaaatcagcgaaggcacatggcgaaaagaacggcgagccagctacagccgtgaatttaaggtccgtctggctaagcaggcattacagcccggtgctgttgttgcccggatcgccagagagcacggtatcaatgataacctgctgttaaaatggaaaagccagtacgaggatggcttactgagcgatgatgacatacaggaatgcatgcctgtcccggtggctctgactgatacgccagagccgaccagaccagttacaaatcccttctggcgtaacaagcctgatgagtgccctgagagtgatcccggaaacgtcccacggtgcgagctgcatcttaaatcaggtgtggtaaaactgtttgaccctctcactccggaaatgttacgggcgctaatccgcgaaatgaaaggaggtacccgatgataacgctgccaaccggtaccagaatctggatcatcgctggcatcacagatatgcgttgtggcttcaacggcctggcttcgaaggtgcagaacacgctgaaagatgccccgttctccgggcatatcttcgtcttccggggccgcagtggcaaaatggtgaaaatactgtgggncgatcgtgacgggttatgcctgttcgccaaacgcctggaacggggccgcttcgtctggccggtaacccgggaagggaaagtgcacctgacgccagctcagttatccatgctactggaggggatcgcatggcaacatcccaaacggacagaacggcctggcatccggatataacccgtgataaaacaggggaatgaacaacacactccccgacgacatcgagcaactgaaggccctgctgatcgcacagcaggctgttatcgtccgtctgtctggtgaaataaccggctatgcccgcgagatcagctcactcagagcgctggtcgctaaactgcagagaatgttgttcggtcgcagcagcgagaaaagccgcgagaagatagaaaagaagatcgcacgggcagaaacgcgtataaccgagctccagaacaggcttggtgaggcgcagttgcaactcacctcaatggccggagagacagcgccgaaaacatcagactctcccgtccgcaaagcacttccggcaacacttccccgtgacaggcaggttatctccccggcagaaaccgaatgccccgtctgcagcggcaaactgaaaccgctgggagaaagcatctctgaacaactggatatcatcaacaccgcgttcagggtaatcgaaacggttcgcccaaaacgggcctgcagccggtgcgactgtatagttcaggctccgcagccaccaaaacccatcgagcgcagttacgccagtccggctctgctggcccgcataatcatggctaagttcgccgagcatctgccgctgtaccgtcagtcggaaatctatgcccgccagggcgtggagctgcaccgcaatacgatggggcgctgggttgacatcatgggagagcagcttcgcccgctgtatgatgaactgaagcactatgtgctgatgccgggtaaagtgcatgccgatgacacgccggtaaatgtactggagccgggtcagggtaaaacccgtaccggacggctgtgggtctatgttcgtgacgatcgcaacgccggttcgaccatgccggcagcggtgtggttctcatactctcccgaccgcaaaggcatccacccacagcaacatctggcggactacagaggtatcctgcaggccgatgcatatgcgggttacaatgctctttacgaaagcggtcaggcaaccgaagcggcttgtatggcacatgcccgacgcaagatccacgatgtacatgtccgccatccaacgacagtaacgggagaagcgctccgtcgtatcggggaactgtacgctatcgaggctgagatccgcggcagtccggcagaagagcgactggcggtcagaaaagccagaacggtaccgctaatgcagtcgttgtatgagtggctccaggggcagatgaacacgctgtcgcgccactcggatacagcgaaagcgttcacctatctgctgaagcaatgggacgctctgaacgaatactgccgcaatggctgggtggagatcgacaataacctgtgtgaaaacgccctccgggtagttgcactggggcggcgtaactaccggacgtggtttctgccaggtaaaggcaacggaacaaaagaatcatggtttttccggaaccggccacaccatgaatgacacgatgcccgtcaccaatatttctgnncagaatctcctgctgaatatccataattttgatttgtgagttctgtttcacggtcacttcaggaaacagatgggcgcgcagaatatccctcatccggggtgttacccgggttctgaaccccgtggtaaacatcccggcaattttttgccggaatacctcaggtaaaacagactgcgtcatttcatcctgacagattgtctgtgctgaaggaaaaatcttttccaccgcattctcattattccctgtcagtgccttcagttgctgacgggtaatgcgggtaaacaccacaccatacgcccaggccaggttcagccgccccttatactgaccgtcattctgccgtaagcacgggtcagcaggtaaggcattaaccgtatcacaggcataacgacgaacctgtaccagcggatttatttctgatttcagaagaccgtcggtttccagtgtaacctgctcctgatttgctttacgtaatgtggatacagtccagtccttgacctccagaaataccagcccgttatccgggtcaataatgacaaaatccggatgtcggtttttccgtcccaccgggatatcgtaccagacaaagcaatcatcattcagaaagctctccagtcgtgaagccaccctcctctcccctggcgtcattctctcctcagtggacgctgatatatttatcagtttcgccataacatactcatgctccagtaaaaccataaccgtcgacatattccgtctgaagggaatatgtcgaatacttcattaaaatacaaacatttagtaaacttcactacgcaagtgcaattatccagtcccgtctaatgattaaaaacgataaccaactccaacagtaaatccattgaccgaatgttttccatatatatctgctttagttccctcatacccaacatttacagacatattgccccacggattaataataacaccagctgcataagcaaaatcagtggatttttttgatacagactcacttaaatatccatcagactcatcagcacccacactgtttctccactcataatctcccttcgctttagtatgagatatccccaccaaaccataaaaactgatatagtcattcagacgataagctgggcctgcgagaaatgaataatatttaatatcagcctgatgtctgtaaaaatcgtcagcttcatcgcgatgactgtccgcccaatcacctttcatatacgaaaaactcccgacgacactgaccggagaatcccactcatatcgatattgcagattcactcctttaatattcttaaagtcctgtaccttactctgagcataaccagccgatagcgtatgattatcagccagtcttgaaccactcataacatataatatcattactgaaattataacgagtttttttcatttaaccctccttcattaatannnnatttctgaaaatcaaaaaggaccacacatctcaaaaacattatttgaaatcatcatcaaaaaactataaatatatcacctgacgatttgaacacactgacaaaaaaccaagcatggtaataaaccgaactccccacaaacttctgttgcctcagatactcccccccctttcctcaggcacaaatgttgttccataacgaaccagccctgttcctttaaactctgcatcaatggcataatgtatactcaccagactgagtttgctcctgcatcattatttcgatacgttaatgcattgttcattgcatccggcattccccatcgaatatttactttgttatatcagtcagcccataaccaggtaaatttttaaggcttactgactgaatattcaaaatgtgttacatgttatcaaacctttaaagaataacctgctcttcttcattggccggatttagctcaatcttgtcagcaaaactaatataaagccgttcataaagagaaggatgtagcttcgttatttatcttttacatgtaacagtgccaggggatattccgcacatctctgtggctatcatccccaccacgtctccagtggcagcacctgcggcactggcacgggcgttatttccctgtaccaccgccagtgcagcattcaccacggcatgagctgccacatttgcagtcttattcaccacacctgtaacctgtctcttatacacaaatccccacccggggatttgtgatgtctgtcagtctgctttanggggactctttccatccggtagtttccttcctccccggcagcgattttttgaactttttcttcacccgttgatcttctcttatatttcattttcttcgggtctgttatggtactttctgattgttattcactggcctaacgagcagtctggacatgcccgtctcggtgatccgcgtcgtacacgacgccttgtgtcactgacctcttctctcgctcagcatgcaggtctttctattgtgaaatcatcccacttcactgctcaggttgaaggtgcgtaccgcctgatacgtaacccgtcggtgtccccgtaagccattgccgaagccggatttactgccactgcaagggcatgtgaggcacatccgctgctcctcgcgctggaagataccaccaccattaacttcggtcacagtacggcatttgatgacctggggaataccaccactaacccgaagacgcacgggctgctggctcactctgtcctgatgtacgcccccgacagcgccctgccagtcgatcttatcgaacagcagtgctggagtcgtgccacggacacctacggtgttaagcaccagcgaaaagaacgtccctgtgaagaaaaagaaagttaccgctggcagcaggcttcggagcgcatggccgaacggctgggggagatacagaaacaggtaatcactgtctgtgaccgggaagcggatatctggcattacctgcattataaagtcagccgcgggaagccacacgctgaatgtgatgcaaaaaggcgggcgggcagcccgccaggcccggatgctcatcagttacagcgaagtcagcataaaaaatcccgacaacagcggccaggcgctctcgctcacgtatgtctgttgcggggagcaggagaggacggagcctgctggtatccgctgacatcagaaaaagtggcgagtgccgccgatgcgcgacgtatcgtcagccattacgagcaacgctggctgatagaggaataccacaaagcgtggaaaagtggtggtacatgtgtggaatcgctgcgaatgcagacccgggataaccttgagcgcatggtggttatcgcggtgcgggtgctgggcctgcggcagggaggtatcagtgaagaaacacaaaatgacagctgtgagaaaatactgacgccgacagagtggaaactactgtgggttaagctggaaggaaagcagcttccggcgcaaacaccgcccctgaaatgggcctgtttgaaactggctaaactggggcgatggcatgacagcaaacgcacaagcagccccggttgggtagttatgtgggatggctggttcagacatcaggatatggctgagggttacctggtgatgaagtctcttgatcaggagatctgatcaagagacaggtcaaagatgggggacaacgtctggtgctgtataacagcacaggcctcacactcttgacgcccgtggaatatattagagaacaaaaatttcaatatgtggtggacgcatacagaggattgacagcattcccatactaattgttaagattcaaattgaagtatatctatctgtcattttgcanatgatatgcggtagctttacctaactatcatgaacatttcgaaaaatcatccacaaagccccgaagaataaagcactatcgcccgataaagacctgtaagctcagtggcatggatactattgagctcagaatggcgagctgtaccgttatttcattaccatgctcgacgaacacagcaactactctctggccgtactatcgcttaaaagtgatatcatcaggcatttcttctgctgtgtagcccagttgttccttgttggtatcaaccagatcatcactgatgatgggcaaagagttctcgggaaaattcgacaaaacgctacaggaagccaccgtcgggttcgtatggacttatctctatacgccgaaaataaatgccataagtgagcattttaaccgaacactgagggaacaatttattgagtttaatgaagaattgctctttgaatagctgaatatgttcaatctgaaactggctgagtatctggtactgtacaacagtaaaattcttcataaatcgtttaaactacaaaaatcagtagaatatattatttccactntcaggcggaaaatttatagaaaggatacaaacatatgccaataataaacaaatcggcatcaaattatgttgaatatatttcaaaaaacaatcccccttatttatcaaaaaagagagatgccagtataaatctaaatggaaaggttagtgattgcaatggggaaatcatatggtgtcgacatatagcatcatattggagtgagtttttttgtagtaattcaggaaagatagactacgaaacattttcatcccctcaattattaagcaaagctattgtaattcaggaaaacaaggggacaaataatattaagggtgatgtgtattttgttgaaaatgaatcttggggaagcgttatatataacctttttcttcaacttgagaaagagaataaatctcacacatcattagaagttcgttctcccggacatgcaatggctctgggcattaaaataaaaaacgacaaggaaaataagtttgttattaatttctatgatcccaatcagaccgcgacgcataaacgagtatttttttgcactaataacatttgtgatataataaacctgacagcatatgattttcttagtgagcaatgtctgaaatgttatgggctaaaagaagacacactgtcactttttgtggataaaacaaaatcgaatgacancaataatgtgtttataaaaaaattacctgataatattctccaaggtgttgttattaattttgctatgggagcaggactaagagagataataaaaaaggtatataacgatactcgatttacagatcttacaaaatctcagatgaaaatcttgtgtgaatcaaaaaatgttaataatgttcctgggttgcttttagctctacaaaatggacatgataatgtaattgatgaatatggtactttaattaaaaagtcaaatcttaataaagaagaattaatacatatattatctgcaagaactttggatggaaccatacctggtttatatcaggcccttcaaaatggacatgctcaagctattaagagttatggtaacttagttctggatactattaataaaaatatagatttagagtatttgctttcagcatttaaatatgaggcacatagctctaataaatatactcctggattattttctgcatttcaaaatggtcatgcagacgcaataaaggcatattgtggcgtacttggcaatagtaatttgaaaagaggtgagataatcaggatgcttgaggcgagaaattatgatggtgcaccaggattacttcttgcgtatcaaaatggagatattaatacgattcagtctttttttgactcactaataatgttagatatatcaaaggattttatcgaagagttattgactgcaaaacattatgattttacggggttatcattagcgatcagtcatagacatgatcatgttgtcaaattatacggaaagttatttaaaaaacttgataccagtccatataaaatgtcaattatcctagcattagcaattgattgcgagagaaataatgcaaacataattattgatagtgagtacaagtcaaataaggcagtaaaggaatatgtagaaattttaaaagaattcaatatatgcccagaaaaggtagcagaatacctaagcgagttcagcggaaaacatttcctcgatgtatataattattattccaattgaaaaaaatataaagtatctatcacggcactctcagttgagtatcacaggcacatgtattttagccccctgagtctacagacaaccaatattacttaaataagtgataatcttaatgctgttttttagaacagatgattgatatttttgggccggagaaacgcagacaggctttgttgaataaatcgagcttttgctg

SEQ ID NO: 1488 - DNA, 3965 bp, Escherichia coli
  Strain O55:H7
  modified_base (83)..(83): a, c, g or t
  modified_base (154)..(154): a, c, g or t
  modified_base (1315)..(1318): a, c, g or t
  modified_base (1944)..(1947): a, c, g or t
aggatcagatcactcattttcctgcaaaagctcattgggcgaaacaatctgactcagagaacccggattaaacgtctggcccncagaatcatctatttctcacgcactgtagtacgtaataaaaaagtcatcggtacttttatcaaaaaacatntattctattaattattgccatcacctttttcttattgacaacattactctgctgattgttaaaatctaacctgtattcagggttacgattctatacaatagaacagggaggggaaaggatgtcatcgttaatgagactttttgttaatgtcaacaatgctatgaatttattttagaaaaacaattaagctgacgtagtgttccgtctaaatgacggggcgatattaacatgattagaacaagaggaattttatgttatcttcattaaatgtccttcaatccagcttcagaggaaagacagctttatcaaatagtacacttctccagaaagtttcttttgctggaaaagaatatcctctggaacctattgatgaaaaaacccctattctttttcagtggtttgaagcaaggccagagcgatacgaaaaaggagaagtaccaatattgaataccaaagaacatccgtatttgagcaatattataaatgctgcaaaaatagaaaatgagcgtataatcggtgtgctggtagatggaaattttacttatgaacagaaaaaggaatttctcagtcttgaaaatgaatatcaaaatataaaaataatctaccgagcagatgtggatttcagcatgtatgataaaaaactatctgatatttaccttgaaaatatccataaacaagaatcataccctgccagtgagagggataattatctgttaggcttattaagagaagagttaaaaaatatcccagaaggtaaggactctttgattgagtcatatgcagaaaaaagagaacatacttggtttgattttttcaggaatttggccatgttgaaggctggaagtttgtttacagagacgggaaaaactggatgccataacatatcgccctgtagcggatgtatatatcttgatgccgacatgattattaccgataaattaggagtcctgtatgctcctgatggtatcgctgtgcatgtagattgtaatgatgagataaaaagtcttgaaaatggtgcgatagttgtcaatcgtagtaatcatccagcattacttgcaggcctcgatattatgaagagtaaagttgacgctcatccatattatgatggtctaggaaagggtatcaagcggcattttaactattcatcgttacacgattatnnnnctttttgtgattttattgaatttaagcatgaaaatattataccgaataccagtatgtataccagcagttcatggtaagtcttccggttgtggttgaaaaatatcgttctttaggtatagattcagatgattaatcctgttactaatactcagggcgtgtcccctataaatactaaatatgctgaacatgtggtgaaaaatatttacccggaaattaaacatgattactttaatgaatcacccaatatatatgataagaagtatatatccggtataaccagaggagtagctgaactaaaacaggaagaatttgttaacgagaaagccagacggttttcttatatgaagactatgtattctgtatgtccagaagcgtttgaacctatttccagaaatgaagccagtacaccggaaggaagctggctaacagttatatccggaaaacgcccaatggggcagttttctgtagatagtttatacaatcctgatttacatgcattatgtgagcttccggacatttgttgtaagatcttccctaaagaaaataatgattttttatacatagttgttgtgtacagaaatgacagccctctaggagaacaacgggcaaatagatttatagaattnnnnaatataaaaagagatatcatgcaggaattaaattatgagttaccagagttaaaggcagtaaaatctgaaatgattatcgcacgtgaaatgggagaaatctttagctacatgcctggggaaatagacagttatatgaaatacataaataataaactttctaaaattgagtagagaagctcagccacttgtgtaggggggctaaaattaattctatttcattatatgagaacaccaataagaataataatatttgatcacaactgaagatgctttttacaatgaagaattattgttaaaaaacgctttgttgaatcaaccgaactgttgctgagttgcaggatcacatcacgtattttcctgaaaacgcaggctgcttagtagcaaagcagaagttcaaaatcaccaactaaatagctgcgccgaatagtagatcaatgaaagggaactcagcccggattgtgcgatctgatcaatcgccaaaaatccccccctaaccggactgagcgatgccgatcatagcaccaattccccgcgacgaatgacgcctgatgcaaaaagcaatctataaaactcacgataaaaattatgcccgcaggctgaccgccatgctgatgctgcaccggagcgctcgcgtcagtgacgttgccagaacgctctgctgcgcccgttcctccgtcaggcgctggattaactggttcacgctgtcgagtgttgaaggtctgaaatcattacccgcaggacgttcccgccgctggccgtttgagcatatctgcacattgtttcgtgaactgataaaacactctcccggatattttggctatcagcgttcacgctggagtacagaactgctggcaataaaaatcaacgagataaccgagtgccagttacatgccggaaccgttcgccgctggttgccattagtcgggcttgtgtggcgcagggctgcgccaaccctgcgtacccgtaacccgcataaagcagcaattcacaaagcactggacgaatgtagtgcggagcatccggtcttttatgaagatgaagtgtatatctatcttaatcccaaaaccggtgcggactggcaacttcgcagacagcaaaaacatgtggtaacaccggggcagaatgaaaaatactatctggctggtgctttacatagtggaacgggcaaagtcagctatgtgggtggcaacagcaaaagctcagccttatttatcagtctgttgaaacatctgaaattgacataccgacgggataaacctatcacgctcatagtggacaactacatcatccataaaagtcgggaaacacagcgctggctgaaagaaaatccgaagttcagagtgatttatcagccagtttactcgccgtgggtgaatcatgttgagcggttatagcaggcgcttcacgatacgataacgcgcaatcatcagtgccgttcaatgtggtaactgcttaaaaatgttcattattttatggaaaccgtgagcccattccccggtggtaaatatgggctgttaaaagtgtagcggtattcggcgcagctatttaggatgrtcaggtcgcagaagttctgtgccactacagtgcgtgtactaaacaaaatgacgagggcacgaatgtcataatacgtgcgtataacctgacagtagctaccaactgagggggcttattccaaacctgatttattcaacaaagctggacttatccttactctgaattattttccagacatatgcatcatgtactggctcgcttggttcaggaaatacaggagcaaatctacagctattagatttattcctatttgtatgcaaagtcgcattgcataatgcggagctatgttacagatacgcctgacgtgcgtagtaaaattataaagcaacatatatatacaaggagaaaccgagaaaaataaatgagtcgtatgttgggtagcatcgagataaatattttttttatcacattagcaccttggttaagggtgttaataataatattctctcacttattaaaacata

SEQ ID NO: 1489 - DNA, 531 bp, Escherichia coli
  Strain O55:H7
  modified_base (2)..(3): a, c, g or t
  modified_base (527)..(527): a, c, g or t
anncggaaatgtaattatgagactgccagagaaagttctttttcctcctgtcactagtggcctgtcagggcaggaaaaacaaaaaaaaccgaagagcattaccggatttcaggaaaattatcaacgcaatatcaggccaatcaaaacagcatcagaagcccgactacgcttctttgataaaatggtttcgaaagaaaactctctggaagatgttgtttctttaggtgaaatgattcagaaggaaatttatgggcatgaacaaagaacattttcaccagttcatcatacaggtaactggaaatcatcattgttacacaacgcgctccttggtctggcaaatgtttataatggcttacgggaaacagaataccctaacactttcaacagagatggtataaaaagtactaactcttttagagataacttattgacaaaaacaagaactcccagagataattttgaggaaggaataaaacatcctgaacatgcaacaataccatatgacaacgacaatgaaagtaataaantgct

SEQ ID NO: 1490 - DNA, 628 bp, Escherichia coli
  Strain O55:H7
gaaagatagctggtaacaataacgagctgttgatggaaataaaaaaggaatcccaaagcgaccatcaaatccccctgtcagataagttcctgaaaaggaaaaaacgatctcctgtagctgaagataaagttcaaaactcgttaacaccagaaaattttgttcagaaaatttcacttagtgatgagcttaaaacaaaatatgcaaatgaaattatagagataaaaagaataatgggagaatacaatcttttaccggataaaaacagtcgtaatggtctaaaacttctacagaagcaagctgatttactaaaaataatcatggaggatacctctgttacagaaaatacctttaaaaacatagagatggctatagcagatataaaaagggagtactattcgcatacagttgatattgagaaaaatattcatgccatatgggttgcgggttccccacctgaaagcatctcggactatattaagacttttctcaaaacctacaaagagtttacttactatctttgggttgatgaaaaagcatttggagccgcgaaatttaccagtgtcttaaaacaaattgcatttgatttagcatgcagaactatacagcagaatactccacaaaaaaatat

SEQ ID NO: 1491 - DNA, 7529 bp, Escherichia coli
  Strain O55:H7
  modified_base (552)..(555): a, c, g or t
  modified_base (673)..(676): a, c, g or t
  modified_base (1531)..(1531): a, c, g or t
  modified_base (2060)..(2063): a, c, g or t
  modified_base (2065)..(2068): a, c, g or t
  modified_base (2206)..(2209): a, c, g or t
  modified_base (2214)..(2215): a, c, g or t
  modified_base (2222)..(2223): a, c, g or t
  modified_base (2227)..(2228): a, c, g or t
tattaatctatataatgaaataaggaagaaatacaacaacaacccatcgggacaacaagagtacttaaacaaactcagagagctttatgctacttatcaaaaaatatccacccctctgaaacacatgtttaattcattttttttagaaaacatgattaaacttcaggataatttcttcaactattgcattgtcaaaggtgttacagagattaatgatgagttacgaataaactaccttaaaaatgtaataaaactgtcagacgatgacattggtaattatcagaaaacaattaacgacaataaagatagagtaaaaaaactaattcttgatttacagaaacaatttggtgaaaaccgcatttcaattaaagatgttaactctttaacctctctttcaaaatcagaaaataatcacaattatcaaactgaaatgttgcttcgatggaactatcctgccgcctcagacctgctcaggatgtatatccttaaagagcatggtggtatttatacagacacagatatgatgcctgcatactctaaacaagtaatttnnnnaattatgatgcagacaaacggagataatcgtttcttggaagatttgaaactacgtcgtgcaatatctgatggtgtattaagatatgttaataaccaaaatattgatgaagttaactannnngaaatcagtgatgcagataaaaacattatcaagaagatattaacagaaatatctaaaatgccagaagatagtatttttactaagatcaatacaaggattcctcgagacacaatgcccatccttcgtcgttatcacctatggcctgatggatggaatattcgtgggctcaatggattcatgctatcacataaaggtagtgaagtgattgatgctgttatcgcaggccagaatcaggcttacagggaactaagaagaataagagataatattcatagtgaaatatacttcaaacaaactgatgaattgtcctcacttccagatacagacaaaattggagggattctggtaaaaaaatacctttcaggaagtcttttttcaaaattcagacaagatactattatcccggaggcattgagcaccctccagatatcaggtcctgacttgattcaaagaaagatgttgcaatttttcaggagtagaggggtgttaggtgaagagttcattaatgaaagaaaactgagtgataaagcttatattggtgtctacaaaacaactggcacagggaaatatgactggttaacccctgaatcgatcggcgttaatgatgtcacgcccgcagatgaaagtacctggtgtataggaaaaggccggtgtgttgatgacttcctgttcaaagatgtttcaacactaaaaacagaaaatcttccagaattattcttaacaaaaatagatactgatacgtttttctctcagtggtcaaccaaaaccaagaaagatctgcaaaaaaaaatacaagaccttactgtacgttataatgagctaattgactcgtcgactatcgactttaaaaatctntatgaaatagatcaaatgctccatatgattatgctagagatgaatgatgatatagccaaaaggtcattgttttcattgcaagttcaaatagccgaaaaaattcggaggatgaccattcctgtagacaatataattaacatctatcctgatctacataaaaaaaatgacaatgatctgagtatgtccataaaaggctttcttgcgagtaatccacatacaaaaataaatattctttatagcaataagactgagcataatatttttataaaggatttattctccttcgcagttatggaaaatgagttaagagacattatcaataacatgagcaaagataagactcctgaaaactgggaagggagggtaatgttacaaagatatctcgaattaaaaatgaaagatcatcttagtttgcaatcttctcaggaagcaaatgagtttcttgaaatatctacttttatttatgagaatgatttcttgagagaaaagattgaagcagtaaaaaacaaaatgaattctcacgaacttnnnntnnnnaaaataaaaaaagaacaaaacacatggcaggatctgtccacaaaagaacaaaaattacagcttattaaagcattgaaagaaatttcaggaaatacagagaaggactctcattacgatagacttcttgatgcttttttnnnnaaacnnaatgaanntatnnataataaaatacaaagaataaaagacgagttcaaggaatactcccgtgtagccattcataatatagataaagttatatttaaagggcaaacactggatcgtctttatcatgaaggatatgtattttctgatatcaataccttgtctcgttatacactacacggactaggaataactggtgtacatactgaagaaaacctgctaccagctccttcatcgtccttaattaatatattgaaagaacattataatgaagatgaaattagtgcgaaattaccactagcatatgattacattttaaataaaaaagaatcaagctctattcctgttgaaattttgaacaaactttcagagttaccaccacatgaactactcacacctgttcttggccagagtgttaatcctctgggcatgggctactcatccgataatggaaaaatcacagagcaagtaatagtcagtggagctgatggatttgataatcccatatctggacttatatatacctatcttgaagatctatataacatccatgtaaggatgcgagaaggtacactaaattcacagaatcttcgtcagcttctggaaaactctgtttcttcatgctttttgactgagcaaagtattaataaattacttagtgaggcagaaaaaaggccttatcagtctttaacagaaatacatcagcatctcacaggattaccaactattgccgatgcaaccctttcattactttctgttggattacctggtacgggaaaactattgcgcagggagcaggactatgggcgtccaccagttacagcaattcaggattccacatttgtactcccttataatttcaaaggtattggttttaacgataacattatatcctctgcacctgtagcctcctcattacattttatcgctgaacatgcgaaatatactttattgtcatggcctgagttttatcgtcatcatgcacagcgatggttcgaaatggctaaaggatatggaagccagaatattgattttcaccctcagtctctattggtaacccaagaaggacgctgtatgggattagccttactttatttacagactgaagatactgctcattatagcattctccaggaaaacctaatgactgtgagtgcacttcatcagaccagtaatcgcgataagttgccactgtccaaagatgataattccttaatgacaagaacttatagtctgattgaaatgctacagtatcagggaaacaaatatattaccaacgaatcgctactacataagaccgcatggaaccaagaaagaataactttattattcaatgaaaaaggagttaagcgagccctgataagcacgcctaatcatactctggttctgcaacaactggaggatatttaccggctcactgatccaaattttgggcatgcagatttcctttcacctatagatgctctgaagtttattgaggctatgatacaattaactccaacacttcaggaatattatggcctattaaacaaagacattaataaacatatacaagtacattatgccgaatcagatatggtctggaataagcttctgccagaaaatgatgctggactgagcaccagaattcagcacaccaccaccgaccgtctggcgaatctggctgaaccagtcgctgttgcaggtatctccctgccagtaaaaacactttatgatatcggagccacccttgacggtcggcgcatcacctctcctccaacatcggagcaaatcccttctctgcgtctcaacggtgatgttctgaatgattatctgtcccgcacagttctgactccagaacaggctgataacataagaaaaatactgcacactcagggaatacgcagcggtacccgtcccatagatccggagatgattcgtgggacgcaggatgacctagtttcgtcacagactcgtctgcaaaggcaagcaacacgggttaaacagcaactcgccggtgtacttgatactctgcaacagcacttccagaacattccacgttcatccggtcgtcatctttctgtagagaatattgagctggctgatatcggaagtgggcgtttcaaccttcaaattcgagatggagaaacattgcataccacttctgtggaagtaccggaagttgtgtcccgttttcagaaactttctaccatgctttcagccctgcctgccagtggaatcatggatttcgacctcggcatgagtgtagtcggagtcgtccagtatgcccgcctgctacagcaggggcacgaagacagtaccctagccaagataaatctagctatggatatcaagcaactttccgaagcaactctcggcagcatgattcagattgccgggaataagtttctcaatacagaaggaatccaggggttcagactggaaagcgccgtcgctgaaggtatgcgctcagtagcaacccgtaccggaggcacaatggggaaagccctttctgccagtgcccgtgttcttgaactgcctgtactggaaacagttctggggacatggaacctgtacaacagcgtcattcagctccagcaagctacatcttattctgagacaatggctgcccgggtacagattgcgtttgattccatttctctgggattaactgccgcttcggtagctttcccgccactaattattgccactggccccattgcggctattggtatgggagcttccagtattgcacgtaatgtggcacggaaagaagaacggcatacacaatggctggaatataaaaaattcctgactgatggcagtaaacacattgttgtggcctctccggaaagaggtctgctggatttctccggaaacaaagtttttggaaaaatggtgctggatctgcgtcagtctcctcctctcttgcatggagaaagctcttttaacgctgaccgcaaaatcggtcatcgtccggatctgggggactggcaaattcgtgagaaggtggggtatgccaacagtatcagtccctactcttctctggcgcacggttacgccaacagtaaatggccacgaacaataccgaaaattccctcgggagaatatgacaccataattctgggctacggtcaccagtatcaggccaatacggaaatagaatatctgtctaactggattgtatggcgggaagccgtaccagacagtacttcccgccacaaacgtcctcctctggaggttcttaatagtcagtgtactgtgatagctggagagcgtaaaaccacagtacttcccctgagagtgctcagcgatctgacaccggaatgcacagaacaggctatatcgttaaaagattataaattcatactgagagggggaagcggtgggctggctgttcaggtcggtggcgcgggatattatgatattgatgcaaatcctgtggcaaaagaaaatacgctctcttttcgcgggctaccggaagagtttccgctcacctttgatttatcaaaacaaacacagtcggtcatgctgaaaacaccagacgatgaggtgccggtaatgaccattacccagaagggaataaacaccctggtaggtacagccgccggtaaagaccgactaatcggtaacgataaggacaataccttccatacaagctctggcggcggtacagtcatctccggaggcgggaataaccgctatattatcccccgggatttaaaaacgccgttgacactgacgctgtccagtaactcagtctctcacgaaatctttctgccagaaacaaccctagctgaattaaaacctgtcgcctttgagctgagtttgatttactgggccgggaacaacataaatgttcaaccagaggatgaagcaaaactgaaccactttgccggaaacttcagggtgcatacccgtgatggcatgactctggaggcggtttcccgggaaaatggtattcaactggcgatttcattatgtgatgttcaacgctggcaggctgtttatccggaagaaaataacagaccggatgccatactggacaggctgcatgatatgggctggagtctgacaccagaagtccggttccaaggaggagaaacacaagtcagctatgatcccctgactcgtcagctcgtttaccagcttcaggcgcgttactctgaattccagttggccggtagtcgccaccataccacggctgtaaccggaactccgggaagccgatacattatcatgaagccagttacaacacagatattaccgacacaaatcatactggctggtgataatgaccatccggaaacgattgatttactggaagctagtcctgttctggttgaagggaaaaaagacaaaaacagcgtgatattaacgattgctacgattcagtattcccttcaactgacaatatccgggatcgaagaatcgctgcccgagacaacccgtgtggcaattcagcctcaggatacccgtttactgggtgacgtactccggatcttaccagataatggtaactgggtggggattttccggagtggtcatacaccaacggtaaaccggctggaaaatttgatggcactgaatcaggtaatgacgttcctgccccgggtatccggaagtgcagagcaggtattatgcctcgaaaacctaggtggcgtaaggaaaaaagtggagggggagttactgtcagggaagctgaaaggtgcgtggaaagccgaaggtgaacctactgttccggtaaatatctcagatctaagtatcccaccctattcacgtctgtatctgatttttgaagggaaaaataatgtgttgctacgcagtaaagtacatgcagctccgttgaaaataacatccgcaggagagatgcagttatctgaaaggcagtggcaacagcaggaacatattattgtcaagcccgacaacgaagccccctcattaatactcagtgaatttcgtcgtttcactatttcatcggataaaacattttctttaaaactgatgtgccatcagggtatggtccgcatcgaccgcagatcattatcggtcagattgttctatctgcgtgaacagccaggtatcggcagtttacgtctgacgttcagagattttttcacagaagtgatggatacaacggacagggaaattctggagaaagagctgagaccaattctgataggagatacacaccgctttatcaacgctgcatacaaaaatcatctgaatatccagttaggagatggcgttctgaatctggcagacattgttgcggaatacgcccgtattcaaaaggaagaaacatcaaaaatattgtatcaatatcaaggtgccatgaaaa

SEQ ID NO: 1492 - DNA, 4264 bp, Escherichia coli
  Strain O55:H7
  modified_base (2025)..(2025): a, c, g or t
  modified_base (3386)..(3389): a, c, g or t
  modified_base (3630)..(3630): a, c, g or t
  modified_base (3890)..(3893): a, c, g or t
tggaccatctgtggtagaagatgccattatgaccactactgtcacaacagattcaggtgaactattccctaccttccacccgtggtatacagatgatttatcagggcgttataagagcgtacctatggcaagaaaagcagatactttgtatcacctgacaccaaaaggtgatctacagataatatatcaggtagctacaaaaatggtgaatcaggcgatgattgtatccctgccaaactaccgacacgagtgggaaaaatataatttaagcatcttatccgaaatccctcagaacaataatactgttgtacattcaatcctcagggttaatggccccacaatgcaggtgcgcacaattgactacagaggaacggatgaaaacaatcccatagtatctttttcagatacaaccttcatcaatggtgaacagatgttgagttatgactcgcattcatcagggcgagtctattccagagaagaatatatgatgtgggaattgcagcaacgggtatcagaagcttccagtgcccggacacaggattactggctgatggatgcagcggtaagaaacggagaatggaagatcacaccagaattattacgtcacacaccgggatatatccggagtacggtatcgaaatggtccagaggatggctgaaaaccggcacaatactccagactccagaagacagaaatacggatgtatacctgactaccatacagaacaatgtatttagtcgtcaggggggcggctaccaagtgtattatcggattgatggaatggctggtgcggatatagcggataatgcaccaggggaaacccgctgcaccctcaggcccggaacatgttttgaagtgacaagtgtggatgaaaggcattatgagtggaatatcatttatgtcacgctgaaaacctgtggctggagccgaaatggccaaagcaaaacgccgaatggtgacaacctttttaactaattaaaatctctgttaaagatgtataacccggcatctatgtgctcaccagcatatagatgcaatgtgattcccctgatggtcgtatcagagatggtatgcgagcctgtacatagatttgtgtaattgcctgattttgatatgttcaatccaacatcaaaagcaggttaatttatggacgaaaaacagttgcaggctctggctaacgaactggccaaaaatctcaaaacccctgaagatctcagccagttcgatcgcctgctgaagaaaatcagcgttgaggcagctctcaacgctgaaatgtcccaccatctgggctacgataaaaaccagcctaaaccgggtgccaactcccgcaatggctattccacaaagaccgttatcatcggtgatggccccctggaactacgcactccgcgcgatcgtgatggctcttttgaaccgcaacttgtgaagaaaaaccagacccggatcaccgggatggataaccagatcctgtcgttgtacgccaaaggcctgacaaccgtaagcgtacagcctgaaccgtctggtcagaatctgacgaattagagtaagcgtaaaccgaccgccgtatgtagccattagacaagaattggtaacttagacgcccatctgacacagacggacatctaagtatggaattacaggactggcgaaaagaacctcgtaaaaagtattcgaatgaattcaaacttcgtatggttgaactggcatcacaacctggagcttgtgttgcacagattgcacgagaaaatggcgtcaatgataatgttattttcaaatggctcaggctctggcagaacgaagggcatgtttcgcggcgtcttccggtaacaacctcttctgacactggcgttgaattattacctgtagaaataacgccggatgagcagaaagaacctgtggcggccattgcgccgtctttatccacttccactcagaccagagtcagtgccagttcctgcaaggtggaattccgtcacggtaacatgacgctggaaaatccatcgccagagctgctcacgatgttnatccgcgaactgagcgggaggggaagatgatttcactcccatcaggtacccgtatctggctcgttgccggcgttaccgatatgtgtaaatccttcaacggactgggagaacaggtacaacatgtgctgaatgataatcccttctccggtcacctgtttatcttccgtggccgacggggggacaccsttaaaattctttgggctgatgctgatggtctgtgcctgttcaccaaacgcctggaggaaggccagtttatctggcctgcggtgcgtgacggtaaggtatccattacccgctcgcaactggcaatgctcctcgataagctggactggcgtcagccaaaaacatcccgccttaacgccctgacaatgttgtaaaaaacacctggccgcattataaaaacggccatgagtcagaaatacctcattcgcattgcagaactggaaagccagctccgtcagaaagaccagcaactgagtctggttgaagagacggaggccttcctgcactggcacgtgccgaagaaaagatcgaagaagatgaacgggaaatagaacatctgcgggctcagatagaaaaactgcgccggatgctgttcggtacccgttctgaaaaactgcgtcgtgaagttgaacaggctgaggccctgctgaaacaacgcgaacaggacagcgatcgttacagtgggcgggaagacgatccacaggttccccgccagttgcgacagtcgcgccatcgtcgtccgttaccggcacaccttccccgtgaaatacagcgtctggaatctgaagaaagctgttgcccggagtgtggcggtgagctggattatctgggggaagtcagtgcagaacaactggaactggtgagcagcgccctgaaagtgatccgcacagaacgggtaaaaaaagcgtgtacaaaatgtgactgcatcgttgaagcaccggcgccgtcccgcccgatagagcgtggtatcgcgggccccggattacttgcccgcgtgttaacgggaaaatactgcaaacacctgccactgtatcgtcagagtgaaatctttgcccgacagggtgtcgaactgagccgtgcattactctccaactgggttgacgcgtgctgccagttaatgacgccgctgaatgatgccctgtaccgttatgtgatgaatacccgcaagcttcacactgacgacacaccggtaaaggtactggcaccgggcctgaaaaagacgaaaacagggcgcatctggacgtatgtccgggatgatcgcaatgcgggttcgtcatctcctccggcggtctggttcgcgtactcaccgaaccggcaggggaaacacccggagcaacacctccgccccttccggggtnnnntgcaggcggatgcgttcacaggttatgacaggctgttcagtgcagaacgtgaaggtggtgcgctgacagaagttgcgtgctgggcccatgcccggagaaaaatccacgatgtatacatcagcagcaaaagtgcgacggcagaagaagccctgaagcgaatcagtgaactgtacgccatcgaggatgaaatacggggattaccagagtcagagcgtcttgcagtcagacagcagcgaagcanagcgttactgacgtcgctgcatgaatggatgatggagaagaatggcacgctgtcgaaaaaatccagactgggcgaagcgttcagctatgtactgaatcagtgggacgccctctgttattacagtgatgacggactggcggagacggacaataacacagcggaaagagcgcttcgtgcagtctgtcttggaaagaaaaattacgtgttcttcggtagcgatcacggcggcgagcgtggtgcactgctatacgggctgatcnnnncctgccgtctgaacggtatcgatccggaagcgtatctgcgccatattctgagcgtactgccggaatggccctccaaccgggttgatgaactcctgccatggaacgtagtactcaccaataaataagcgtcaatacggtgctccgttgacgcttaccttctttcattcgctgaaggtggaatgtatctacggggaacgctttagcagccgggaaataatgcgggaaacggtgtttaattatatcgagtgtgattacaatcgctggcgtcgtcacagtgcctgtggcggtctcagcccggactgtcttgcactgcaaatattcagaaatgagtctatgcagttcaccagtaaaatcagccatcagagagggaa

SEQ ID NO: 1493 - DNA, 30651 bp, Escherichia coli
  Strain O55:H7
  modified_base (572)..(572): a, c, g or t
  modified_base (1222)..(1222): a, c, g or t
  modified_base (1315)..(1315): a, c, g or t
  modified_base (4498)..(4498): a, c, g or t
  modified_base (5795)..(5795): a, c, g or t
  modified_base (6412)..(6412): a, c, g or t
  modified_base (7411)..(7411): a, c, g or t
  modified_base (7522)..(7522): a, c, g or t
  modified_base (9694)..(9694): a, c, g or t
  modified_base (10140)..(10140): a, c, g or t
  modified_base (10950)..(10950): a, c, g or t
  modified_base (11993)..(11993): a, c, g or t
  modified_base (13050)..(13050): a, c, g or t
  modified_base (13840)..(13840): a, c, g or t
  modified_base (15616)..(15616): a, c, g or t
  modified_base (16131)..(16131): a, c, g or t
  modified_base (16799)..(16799): a, c, g or t
  modified_base (17004)..(17007): a, c, g or t
  modified_base (17049)..(17049): a, c, g or t
  modified_base (17068)..(17068): a, c, g or t
  modified_base (17147)..(17147): a, c, g or t
  modified_base (20464)..(20464): a, c, g or t
  modified_base (22273)..(22273): a, c, g or t
  modified_base (23391)..(23391): a, c, g or t
  modified_base (24616)..(24616): a, c, g or t
  modified_base (24831)..(24831): a, c, g or t
  modified_base (28796)..(28796): a, c, g or t
  modified_base (30012)..(30012): a, c, g or t
ctcaccgatggtcatcgcaacacgacgccagccaatcatggtgccaatgccgagcgccagtgctactgccatgatgatccacaccggagcgtactcaatggtgcttaacatatcgctgcgcagttttttcagcaggttctggtcttctttactgacgcctggcagtttcgccagcttcgcggaagtatcagagatgcacagcataatgcggcgcagctggctgcgctgactcacgcttaacggctcgtaactttccatattgcctggcagcatcgttttaacgcgcgcaatcgcatcaaaggtatttcccggatgacagtgaaactccgtcacttgcgcgccatcagtagatgccgcaggcaatggaggttccatcgcaatcaacttctgcggcagttcaggatgctgttgcaggtagtgttcgaagttggtaacggcatcgcgggtacgggtaatttcatagccggacgcgttcatattgacgacgaagccagcaggggcaatccccaccagtaccagcatcaccaggccgatccctttttgtccgtcgttcgcgccgtgcgaaaacgccncgcccgcagcggaaacaatcagcgcaatacgcgtccagaatggcggcttacgtttgccttttttctttttgcgatcttccggaatgcggtgaatacggtcacgctttttcgttccgctccagtagcgtcgcagcaggaatatcaggcctcccgcaatgaccaggccgacgataggggaaacaatcagcgaggagaaaattttggtcacttcacgcaggtttaacgcatccatcaccgatgagccggttaacagcgcgttggttaaaccgatgccgataatcgcgccaatcaaggtatgcgaactggaggccggtaaaccaaagaaccacgttcccaggttccagataatcgccgccagcagcatggaaaagaccatcgccaggccgtgggttgaccccatattcagcaacaaatcggttggcaacatatggacaatggcataggcaacgctaagtccgcccaataacacgccaaaaaagttaaaaaatgccgccatcaccacggcaagctgtggctgcatggcacgagtataaataacggttgccaccgcattcgccgtgtcatgaaaaccattgattgcttcgtagaacaacacaaatgccagagcaagtaataacaaaagccctgtgtatatatcaaggccaacaaanaaatttagcatatattagattacgccattttgaatttacgaacggacgcattatcagtgactttaacggtgtgggcaaagtgaaatatcattntttaacgataaaaagagtgttatttcttgtgtatcagacaataagcattcattaaaaatctttagaaataattagaacacaggcattctgctggttaatgtattcacatatgaaatgaataaatatttgaacatataaatattgaatattttgattaatccccgtactgactattcttcataatcagtacgggattgctacaacatgtattactctttcaccacaattaacggttcaatatcactctcttttttaataaccagtgattcatcaccgcgcaaacacgtcccaccgtagttgccgccaacggtgaaggtacatacctgaatgtatttaccgtccactttcggcaaacaccacagttgctgatagatgtttttctgctcggcaaatttaccactggttttgtccagcacctcttcatgatggctgacgaggtcgatgttgctgccacagcgaccggcgatcggtttcactgcgtaacctgttttcaccaattcatcattaacagtgaaatcggtatccagcaggtaacgatggtgcgggaacagcgaccagaggatcggcagaatcgctttgttgccggggatcaccgtccacagcggctcaaagaccagcacttccgggcgcagcaatacgtcgataagacgcacttcattttgcggatgaccggtacggatcggcaccgcagcaaactcacggtcgctaacttcacgaatctgatcaaacgcggtttcccacgcccaggttttccacacgcagttaaccagtcgcccttccccatcaatcagttgcccggcagcatcccagcccagttcatccagcccgcgcaagatacgcgtttcaaagcccgcctggtgcagcgcctgctccataaactgcgcgtgatagttttcctcgatatctttgtcctgcatgatatggacaaacggacgtgcacgactgtgtttccaggcaccagccagttcgttaatcagcccttccgccggattgaagccgttgcctttatagccctgctccgcccaacgttcgaggatcaagcccgcttcggtatgacaggaggcggagtcggcgttgtactcgtaaaccttcagaccacgctcatccatgcagaaatccatacgaccggtgatcatatggtgacggcgacgctgccaggagagacgcaaacgtggccagaggattttcggaatgtcgaacagcgccagcaggttgtcatctttcagcaccttttcggttgcgtgaagatacatcaggtgcagctcgttggtggctttaatcagctcctgctcggcgctctcggtaatggtgtagtaatgatacggatcctgattgatcacctgaccgttggcctgcacataggcgttttgcagcggatctttttcatccagccatttaccgtcaaactggcctttgttttccagacgcgctccgctgattttcagcagctcgcctgcaatttccggctgcggtaagctgtattcagtatcttccgtctggatcatccagcccagaatggtggtgtcatcaaaagtgtctttaagggtatagcagccgttttcgaccaccatctccagttcgcgcgtccactgttgcccttgcggcaacggggaatgaatcacgttctgttccgcaatacggactttgttgccatgtaattgggtaatgatggcgacatggccagtgtctttaaattcaccgcctttatcccagataagaagcgcacccgcgaccggcgcacgcggcgagccgttaggaaatgcctgcaatggcaggatgttgtcattaaccacttcacgcaggaagcgcagcgagaaaatctcccacgccatacccacgtcagtaaagaccacaccgtagttcagaaagagaaaacggcgagcaaattcaacgcattgccatttgtggcccatatattcgtcgtcgatatagctacggaatacggcgtcatcttcgtattcctgcggatcgagagaactgtaatctgaagagtagattgctaccccacctggggcgtagcccaataatgtcccgaacggggcatcctggctggtcgttcctttgctcatcactttacctttaacaatacaacctaagcagttggcgtaattgttgtgctctgattacctgctcagcgacattaaccggacagaggtcagactaatcatacacctcatcgcagcggctggcgcaaagggttaaaaaattcacattctgtacagcaagtgacctgctacactgcttcaacactaccactcagaaggcaactcactatgacagacaatacttatcagcccgcgaaagtctggacgtgggataaatccgctggcggcgcgttcgccaatatcaatcgcccggtttctggtccgacgcatgaaaaaacgctgccggtgggcaaacatccattacaactttattcgctgggaacgccgaacggtcagaaagtaacgattatgcttgaggagctgctcgcgctgggcgttactggcgcagagtacgatgcctggctgatacgcataggcgatggtgatcaattctccagcggctttgtcgaagtgaacccaaattcgaagatcccggcgctgcgcgatcatacccataatccgccgatccgcgtgtttgagtcaggatcgattctgctttatctggcggagaaatttggctacttcctgccgcaggatctggcaaaacggactgaaacgatgaactggctgttctggttacagggcgcggcaccgttcctcggcggtggttttggtcacttttaccattacgcgccggtgaaaattgagtacgccatcaatcgctttaccatggaagccaagcgcctgctcgacgtgctggataagcaactggcgcagcataagtttgttgcgggcgatgagtacaccattgcggatatggcgatttggccgtggtttggcaacgtggtgctcggcggcgtgtatgatgccgcagagtttctggatgcgggaagttataaacatgtgcaacgctgggcgaaagaagtgggcgaacgtccggcagtgaagcgtgggcgtattgttaaccgcaccaacgggccgctgaacgagcagttgcatgagcgccatgacgccagtgattttgagacgaatacggaagataagcgtcaggggtaaggattggtgttcgtcgcagcaagccatccaggccggataaggngttcacgccgcatccggcaatcgagcacaatgcctgatgcgacgctgccgcgtcttatcagacctacgaaagctaatcatcacgcgctggtaatgtcgtaatccatttggcgcagtgcgtctaatgtggctttggcttcatcttcgtcgatgatgctcatggcaaatccgacgtgtaccagcacccactggcccagcagatcggcagggttaccttcacaaatcagggcgatattcacgtcgcgcttgataccacatacttcaacctgcgcaagctggtgaatatcttcaccgacagccagcacctggcctggaacgccaatacacattgttaactccggttattcaacttcaatacttttgacgatcagcgaatcgccggtatcgacacgcaaccgctcgccgtgacagagcggacactgcgcatcgtgctgatgaacctccaccacctggctgcaatcccagcaccaggcctgggcgggtttatagacgatatgtaaatcgcacccttgcgccaccgttccgtggcagacaatttcaaaactaaaacggacggcgctctcctcaacgcaggagagcgcgccaatttccagccacacggcggtgacgcgcttaacatcgtgctgctccgcctgccgctggataatttcaacggcgctctggcaaagcgacaactcatgcattttcgccactcctgcgaccaaacagcagggcgcgacgccctgcgtgtggtacatccggattcgtgactggcagcgaaaggatcattcgtgcgcagtcatccgtcaggcgttggccctcttcaatcgacatactgtgcgaaagcggtgacatcagcgaacaggagaggtattgcgaaacaccgtccagttcgccaacggtaaaggtcatggtgccatacggcagttgcagaccaattttttcactcactttgcgcagcggccagagttgatccgggccggggaagataactgcactcagcatccacggggtgatcacacaccccgtccactgaccttcgaacagcgtaaaatcagaaacatacaccggcattgaaggatgcagaaaagagagatcgtgcatcgaacgccgggcaatttcttcaaacgctgcctgtacttgcgccttcggggaggtctggaaacctgctatctcttcagtcatgaatcgcctcccgtgggatggcttccacgccagattcacgcagcgcagccagaacctgctcaagcgcaggttcaatcattgcttcaaccgtcggcgttaagccgatgtgtggctccagcgattccggaattacnccgaccagggtcagctttttcggaaactcgccggtgaagcgcagggccgacaagacgtcggccaggccaagctgatgcggagagattttgttggtaaacaacgccggaacttcttcatcccgcaggatcatcatcgttcccggcgcgctcttcttcgacacaatggcatccgcaataatcagatgatcgcgatttgccatgtcgccaagcagctccattcccgccgtgccgccatcgaggatctcaacataatccggcagaatgtatcgttgctctaacgcttcgacaatccgcacaccgatggcttcatcggtcagcaaaatattgccgacccctaagactaaaatacgcattacagaaccttcactgaaaccacttcgttgccgtcagcatccactacgtgtaccgcacaggccatgcacgggtcgaaggagtgaatggtacgcaccacttccagcggtttattcggatcagcaaccggtgtacccaccagcgactgctcgtaaggaccgacgtcatcattgaagttacgcgggccagagttccaggttgatggaacaactgcctggtagttgctgatgataccgtctttgatcaccatccagtgagagagcatnccgcgcggcgcttcgaggaagccaacacctttgaactcacccgttgccggaatgttcggcttcacaaaggtggtgtgatcgcctttgccgatattggtgatcagtgcactgtattggttttgcaggatatcctgcaattcacagcagtgaacggtacgaccaataatacggcccagcgtggagtgcagctgtgccacttccagcgtgttgccagtcagtttctgataaatcgcaacgatttcattcagtttgttctgggtagattcgcgacctgccgccagtttcaccagcatattagccagcggacccacttctaccgttttgccgtagaaagtcggtgatttcacccaggaatatttcccgtcgtcagaccaaccatcataagccggaatggtggtaccttcccacggtgcctgcggcgcttcgtctttataccaggagtgcttcgcgctttcctgaatgcctttgatcaggtattcatcggaatgagaagtgatcggacgatacgaggacagatccgcattctcaatgtagccgcccgggaacaggaagctgccgtttttactgtcggtcgggaattccggcacgctcaggtagttcaccgcacctttaccgcacgtcagccattccgggtagaacgcagcgataaccgcagtatcgaccttgtaaacctgctcaacaaagtcactcagcttgtcgatgaaagacttgatgtacatcaggcgctcaaggttcagcacgcccagaccgtcgaggttgattgggttagcgaccccacctaccgccaggttctgaatgtgcggcgttttaccgcccagcagcgccacgacgcggttagcgtcacgctggcactccagcgcctgcaggtagtgcgctaccgcaatcaggttcacttccggcggcagtttcatcgccgggtgaccccagtagccattggcgaaaatacccaactgaccgctggcaaccagatctttgatcttgttctgaactttggtgaantcttccggactgttcaggtgccaggtcgaaacacctttcagcatttcggaggctttggttgggtcagcttgcagtgcagaagtgatgtccacccagtccagcgccgaaagntgatagaaatgaacgatatggtcatgcgtggtgtgcgcagccagaatgatgttacggatgtattgcgcgttaaccggaacgtcgatattcagcgcactttctgccgcacgaacggaagacagcgcgtgagtggtagtacatacgccacagatacgttgcacaatcatccatgcatcgcgcggatcgcggtttttcacgatctcttccatgccgcgccacatggtaccggaagcccatgctttcgaaacgacgccattttcgatttcgcaatcgatgcgtaaatgcccctcaatacgggttaccggatcaatagtaattctctggctcatgctttgctcgcctcatgacgattatgatcgttttgttttaaaggaggaagtatcggcagtagacgaatgagtacgatgtaagcgcaaatctcaatagccacaaaaccaatagaaatcaacagttcttcccaggtcgggaagtaggcgtaaccgccgcccgggttgaatgccaccagcgaataggtcagacgccaggttgcacaacctaacagcgcgctcagtgctgacaggaacagcatgcgggaatcattacgcagcttcgccacacgcagaacgaccagcgggaagagcatcagcaggacttcaatccagaacatcacggagtagaagtcaccggcaaacgctaacgacagcttgtcgcgatagataagctcgccaaagcgcagcacgatgaaaatcgccagcaacacactgatggtgttggtcagcttgacgaataggctcttttcatccggaccgttgccacgcagacccgcctgcaccagtgaaccttcaaagatgacaatcgagaagcccatgatgaacgccgtcagcagcgagaacagcggcaacatttcatagctctgccacagcggatgcaccttgtagcccgccgagatcatcagcgaccccattgaagactggtgcatggtcggcagcagcgcaccgagcgcgatgatgaagaacatcaccttgttcagacgctgtagcgacaccttccagcccagacgttcaaacagtgccggagcaaactccagagccatcacgccgatgtagatggtcatacagaccgccgtctcgaacagtaccgagttcacgttgaagtgacccggaatgtagaagtacggcaggttccagtagcgacccacgtcgatagtgatcgacaagccacccagtgagtaaccaaacagactcgccaacagcgccggacgcaccagcggatggtattgcccacggttaaagacgtataccgcccacgcaagcgcccagccgccacaggcaaagccggtgccaatcagcaggtcaaacgcgatccacacgccccacgggaagccgccgttcaggtcagagacagagcccagaccgaacaccagacgcttcacaatcaggagcatacagatgacgattaacggtccaaaaatcatgaccggtttactgatgattttgccgcccagcggttgtggatcatgactcatgatcgtctcctccgtcgtgatggtcgtttttggtgttgcgacgaaccagcacggtcaagcccgccagcacagccagtggtagcatcatgcctttatacagggtgtgttgaatattttcggaacgcgcaccggtagaaagatcgtccagtttcggcaggtcgagattttcataaggcacacccgtcagtaccagaacctgagtaccgccgccctctttctcgccgtacagatgcggataatatttcggcaccgtatgcaggtaagtgtcgccagatttcagcgtctgacgcggatagtggtattcgctgccaggcttcagcgccagacgttttttcgcctccgccatcagctcttcacgcgtaccaaaaatcaccgcgcccgccgggcacacttctacgcagccaggcagaccgcctttatcgagacgttccacacctttctggttgcacagctcgcacttatgcagcgcaccaaacgggttgttgtagtcgtacttcggcacgttgtacggacaggcgaccatgcagtaacggcaaccggtgcacacgtctttgtcgtaatggacaatgccggttttcggatcttttttcagtgcagagaccgggcacacagagacacagttcggatcgacgcagtgcatacactgtttcttaatgtacgcgtagccnttctcctcctggtctttgttgacccctgtgccgctggtccacacttgaatgatgttattggtatacggcgacagtttgtcgttgttcgaccaggtctgttccccttgcgggttacgttcagggaagttgatatcctgacacttggtgacgcaagcctggcagcctacgcacaaggtcgagtcgtacaacatccccagcgatcccggaattggcgggcggttttcagcagccgcatgactgacagacggcagcgcgcccgtcagcaatgccccgcaggaggctgctttaataaaattacgtctgttcacggttattctccccgtgagtcagcgttatctttcttttgctgacgacccagttcacgcaccgccatcacgctgacaccggcaaccagcccaaccacaccgccgagcaaaccaatagcgcctgcagagacgttgccgccntctttagcgttaacatccggtttctgtgaacgcggagtctgattttcgacgttggcaagctgatggatgcctttatggaagccgataccttcttcgttacagccatagcacgggtgaccaatcgccaccggccacacaccgccaacatcgcagaattgcagcgttgagcagttgccgtaagtttctggccctttacagccgaggtggtacaggcaccagccttcgcggtggccttcatcaccgaactctttggcaaaacgaccagcatcgaagtgcgggcgacgttcgcagtgttcgtgaatcagacggccataggcgaaggtcggacggtttttgtcatccagtttcggcggtttgccgtaagtgatgatgtgcgcaacggtcgcgaggaagttgtgcgggttcggcgggcagcccggaatattgataacggttttgcctggcagaacttcttgcaagctgactgcgccagttgggttaactccagctgcggcaacaccgccccacgcagagcaggaaccgatagcgataatggctgctgcgccttccgccgctttgcggatgtgatccacaatcggctcaccggcaaccatgcaataaataccgttatcttttaatgggatggaaccatccaccactaacacatactgccctttgtacttctcgagagcgttatgtttgttctcttcgacctgatgaccgaaggcggcggaaagcacttcgtgatactccagagagatagtctccagtacgaggttttctaccgttggatgcgttgcacgaagcagagattccgtacaaccggtgcantcctgcgcgccaatccagataactggcggacgctgcgggttagtaaccgattcggccatctctgcagcggctttgctacttaaccccatggtggcggctaatgctgcacaaagcttcatgaaatcacgacggttaatgccgtgagaatggatgagggtgttatctccagtcatttatagttattccgttgcgaagacctggcatatattttgcctcaatcgcaaaatcaataatgcgatcgatgcgccatttaccacacatttattatggttatcgatatcatgatactgcggcggggcgctaaaacgaagggaagaagcattagtgtaattaattaaagcaagataatacgtatgtttgatcaattttcgaggcgataaccggccataaaaaagcgcaacgtagaacaggaattattctcacgaaagaaatccattaccatctctttatccagtccatagcggcgcgtcagaatacccgcttcccaggcgctaagctggcgatctccggtcttttcgtacatccggtgtgagtagcctaatacaaaaccgcgtttataatcggcacagaattttgtcacattaaccgcactgtcggcatgcgttgcttttaatcccgccattaagcctttaccaaaatggttattcatcgttcacctcattcgctatatatcgtaatatatagcgatattttaggcaaagaacgacttttgcgcacgctattttttcatgcttgtttaagacgtaatcccgtaagagataaacctatcaggagagatatttatcgaaccatttcagtgtcctttgccaggcaagatcggcggcagatttgtcataacggggcgtggaatcattatggaatccgtgattaacccccggatagatatacgcctcataaaccttattattggctttcaacgccgcctcgtaagcaggccagccctcgttgattcgggtgtccagttccgcgaagtggagtagtaaaggcgcttcaatcttcgccacatcggcagtgggtgcctgacgaccataaaacggcactgngcaggccagttccgggtaagcgaccgctgccgcgttcgatacgccaccgccatagcaaaatccggtaatacccactttgcctgtcgcttgcggatagcgttgcataaactcaattgcggcaaagaaatcattcatcagtttggttggatcaacctgctgttgcagctcacgacctttatcatcatttcccggataacctccaacggaatttaagccgtcaggtgccagggcgatataccccgccttcgccactcgccgtgccacatcttcgatatacggattcagtccacgattctcatgcaccaccaccacggctggcgttttgccgctcatttttgcgggtttaaccagataaccccgtacctcgccgtgaccatttggcgaaggatacgtgatgtactcagcaaaaatctccgggtcggtaaactctacctgagtcgccagcgcataatttggcttgagcaaatcaaacaacgctaatgccgtcatcccgcctaccgcatacttcgccgcaaggttgaggaactcacgtttcgagattttcccgtgagcgtaatagtcgtagtaatccagcaactcttgtgggaaatctttggcggttaaacgcggcatcgttgcactcctcagttggtgtttttttaagcaaagcataagcacgtgtttttgcccagtttttcgtcactctgtgagccagactacgggatacgcgctggcgaatcgctaaactagaaacattgtttcgaaattgaacggtggaaaggagaggtcatggtctggttagcgaatcccgaacgttacgggcagatgcaataccgctattgcggaaaaagcggtttacgcctgcccgcgttatcgctcggtttatggcacaatttcggtcacgttaacgcgctggaatcacagcgtgcgatcctgcgtaaagcgtttgatttaggcattacgcactttgatttagccaacaattacgggccgcctccaggaagcgcagaagagaactttggtcgcctgctgcgggaggattttgccgcttatcgcgatgaactgattatctctaccnaagctggctacgatatgtggcccggcccttacggctctggcggttcacgtaaatacctgctcgccagcctcgaccaaagcctgaagcgtatggggcttgagtatgtcgatatcttttactctcatcgcgtcgatgaaaatacgccgatggaagaaaccgcctctgcgctggctcatgcggtacaaagcggtaaggcgctgtatgtcgggatctcctcttactcaccagagcggacgcaaaaaatggtcgagttgctgcacgagtggaaaattccgctgttaattcatcaaccttcgtacaatttactaaaccgctgggtggataaaagcggcctgctggataccctgcaaaataacggcgtgggctgcattgcctttactcctctggctcagggattgctgaccggaaaatatctcaacggcattcctgaagattcacggatgcatcgtgaagggaataaagttcgtggtctgacgccgaaaatgctcaccgaagccaacctcaacagcctacgcttattgaatgaaatggcacagcagcgtggacaatcaatggcgcaaatggcgttaagctggttgctgaaagatgagcgagtgacgtcggtattggttggtgccagccgcgcggagcaacttgaggagaacgtgcaggcgctgaataatctgacatttagcaccgaggagctggcgcagatcgatcagcatatcgccgatggcgagctgaatctgtggcaggcgtcttccgataaatgacctgttaataacgggcgcgagaaccgcgcccgaatcanatcagtgattatgacgagtcagtcggtcaagatagcccattacaaatgcagagagcacaaacgtcagatggataatgacgtaccacatcagtttgttatcagggacatttttcgcatccataaagacgcgcagtaagtgaatggaagaaattgccacaatcgacgctgctactttgtttttcagcgacgttgcatccattttccccagccagttcagcttctctttgttctcggagatatcgagttgtgagacgaaattctcataaccggaaaacatcaccatcaccagcaaaccgccaaccagcgtcatatccaccagcgacagcaacacgaggatcaaatctgattccgccatcgagaagatattcggcagtacgtgaataatctcctggaagaacttcagcgccagggcaactaacgccagcgaaaggccaaagtacacgggggcaagcagccagcgagaagcatacattgcattttcaagaaaacgttccatacattcctgtcgtgtagttaaaacgggcaacagtatatcgcaattgagtaaacagcgcgcaacagcaaatcaacatatccgttaaatctttgtcgcataattctgagggttagggatcttcctggttcccttatcaacgcatcgagagcgtctacccttaaaggacgttgaacctgaagggagaaaaacgatgtctcatttaaaagacccgaccacgcagtattacactggtgaatatcccaaacagaaacaaccgacgccaggcatccaggcgaagatgacaccggtaccggattgcggcgagaaaacctatgttggtagcggtcgcctgaaagatcgtaaagccctggtgacagggggcgattccggaatcggtcgcgctgccgccatcgcttacgcgcgtgaaggggctgacgtggcgatcagttatcttcccgtggaagaagaagacgctcaggatgtgaaaaagatcattgaagaatgcggacgcaaagccgttctgctgccaggcgatttaagcgatgagaaatttgcccgttcgctggttcacgaagcgcataaggccttaggtgggctggatattatggcgctggtcgccgggaaacaggttgccattcctgatattgcagacctcaccagcgaacagtttcaaaagacctttgccattaacgttttcgcgctgttctggctaacccaggaagcgatccccctgctaccgaaaggtgcaagtattatcaccacttcgtcaatccaggcataccagccaagcccgcatttactggactatgcagctacgaaggcggcgattctgaactacagccgaggcctggcaaaacaggtcgcggagaaaggtattcgggtgaatattgtcgcgccaggcccgatctggacagcactgcaaatttccggcggacaaacgcaggataagatcccgcagtttggtcagcaaacgccgatgaaacgtgcggggcaaccggcggaactggcccctgtatatgtttatctggcaagtcaggagtcgagctacgtcaccgcagaagtgcacggcgtgtgcggcggcgagcatttaggttaaaaaaatgcccggttgtgaaaagcaaccgggcatcattgtgaattcactcttacctgatgtggcgaaaacgccttatccgcctacaaacgcatgaagattcaacatgttgcaatagattttgtaggcctgataagcgtagcgcatcaggcattgagcacctaatgccggatgcggcgtgaacgccttatccggcctacaaacgcangaagattcaacatgttgcaatagattttgtaggcctgatgaacgtagcgcatcaggcaattctactttacttcgctttggcggtttcttcgccgaccagacctatcttcaggtaacccgcctgatgcagcgtgtccattaccttcatcaacgtctcgtaatcgacagttttatccgctcggaagaagatggtggtgtctttcttgccttcggttaacgcattcaacgccgtaatcattgtttcatcggtgaccggatcgttaccgataaacatcgagttgtctgccttcaccgacagataaaccggtttttccgggcgcggctgcggcgtgctggtagaagcaggcaagttaaccttcacatctaccgtcgctaacggtgccgccaccataaagataatcagcagaaccaacatcacgtcgataaacggcgtcacgttgatatcatgcatttcgccgttatcgtcgaggttttcgttaagatgcattgccatcggacattatcctgcgcgtaatntttgtgcgacacgaaccggatgcgcagcggcgctggcttccagatccaggtcacggctttgcagcaacaatacctgcgctgcgacatcacccagcatcgctttaaagccgccaatctgacgcgcgaatacgttatagataacgaccgccggaatcgctgccaccagaccgattgccgttgctaacagagcttctgcgatacccggcgcaacgactgccaggttagtggtctgcgtttgcgcgataccaataaagctgttcatgatgccccagaccgtaccaaacagcccaacgaacggcgaaatcgcgccgatggttgccagatagccgttaccgcggcccatttgacgacctactgcggcgacccgacgctccagacggaagctggtacgttctttaataccttcgttatcgtcgctgccttctgacagttccagctcattctgcgcttcattgagcaaatgcaggcttaagcttttgctaccaaaatcagcggcgatatcgttggcctggtttaaggaacgcgcttcagccagcagttgctgctcgcgcttaaggcgacgcttctgattaaagaactctacgctcttactgaagaagattgcccaggtgactacggaggccaaaataagcccaatcatcacgcacttaacgacaatatcggcgtgntgatacataccccagacggaaaggtccgtctgcattaaattattacccactgtgtatctccaggacgcaagtcacaaaatctgcgcataataatatcaaaacgacgtcgaattgatagtcgttctcattactatttgcatactgccgtacctttgctttcttttccttgcgtttacgcagtaaaaaagtcaccagcacgccattnnnnaaaattttctgctttatgccaattcttcaggatgcgcccgcnaatattcatgctagtttanacatccagacgtataaaaacaggaatcccgacatggcggacaaaaagcttgatactcaactggtgaatgcaggacgcancaaaaaatacactctcggcgcggtaaatagcgtgattcagcgcgcttcttcgctggtatttgagagtatggaagcccaaaagcacgcgacgcgcaatcgcgccaatggcgagttgttctatggacggcgcggaacgttaacccatttttccttacaacaagcgatgtgtgaactggaaggtggcgcaggctgcgcgctatttccctgcggggcggcagcggttgctaattcgattcttgcttttgtcgaacagggcgatcatgtgttgatgaccaacaccgcctatgaaccgagtcaggatttctgtagcaaaatcctcagcaaactgggcgtaacgacatcgtggtttgatccgctgattggtgccgatatcgttaagcatctgcagccaaacactaaaatcgtgtttctggaatcgccgggttccatcactatggaagtccacgacgttccggcgattgttgccgccgtgcgcagtgtggtgccggatgccatcattatgatcgacaacacctgggcagccggtgtgctgtttaaggcgctggattttggcatcgatgtttctattcaagccgccaccaaatatctggttgggcattcagatgcgatgattggcactgccgtgtgcaatgcccgttgctgggagcagctacgggaaaatgcctatctgatgggccagatggtcgatgccgataccgcctatataaccagccgtggcctgcgcacattaggtgtgcgtttgcgtcaacatcatgaaagcagtctgaaagtggccgaatggctggcagaacatccgcaagttgcgcgagttaaccaccctgccctgcctggcagtaaaggacacgaattctggaaacgagactttacaggcagcagcgggctattttcctttgtgcttaagaaaaaactcaatgatgaagagctggcgaactatctggataacttcagtttattcagcatggcctactcgtggggcgggtatgaatcgttgatcctggcaaatcaaccagaacatatcgcagccattcgcccacaaggcgagatcgattttagcgggaccttgattcgcctgcatattggtctggaagatgtcgacgatctgattgccgatctggacgccggttttgcgcggattgtataacattgccacttttggacaattttgcagacattttattgtgaaaagtcttaaattgttgcgtccgggatcaaggcgtcccggacgattcaggagtacaataggcagataaaggcttaaacgctgttccacaggaaagtccatggctgttattcaagatatcatcgctgcgctctggcaacacgactttgccgcgctggcggatcctcatattgttagcgttgtttactttgtcatgtttgccacgctgtttttagaaaacggcctgctgcccgcctcatttttgccaggcgacagcttgttgatattggctggcgcattgattgcccagggggttatggattttctgcctacgattgcgattctgaccgccgcagcaagtctgggctgctggctaagttatattcaggggcgctggttagggaataccaaaacggtgaaaggctggctggcacagcttcctgctaaatatcaccagcgcgccacctgcatgtttgaccgccacggtctgctggcgctgctggctggacgttttcttgcatttgtccgtacgctgctgccaaccatggcgggaatttccggtctgccaaaccgccgtttccagtttttcaactggttaagcggattgctgtgggtcagcgtggtaaccagtttcggctatgccttaagtatgattccgttcgttaaacgccatgaagatcaggtaatgacgttcctgatgatcctgccaattgccttgttaaccgctggcttgttaggcacgctgtttgtggtgattaaaaaaaaatactgtaacgcctgacgattttccctgttcccggttgctgtaccgggaacgtatttaattcccctgcatcgcccgcattcttgccgcatcttcccccggcgtcacaccgaagtaacgtttaaactcacggctaaattgcgatgcgctttcatagccgacgcgcatcgctgctgcgctggccttcatgccgtcatggatgatcatcatccgcgccttatgcagacggtaattcttcaaatactgcaacggcgaggtgctggtgacagacttaaaattatggtggaacgccgatacgctcatattggcttctgccgccagttgctcgacgctcaggttttcggtgtatttattctcaatccgtttcagcacgcggctaatcagactgaagtgagtctggcgactgaccagcgccagtaacgcgccgccgcaaggtccggtcagcacgtagtacagaatttcgcggatgatctgtttgccgagaatacgcgcatccagtggtcgcgccatcacgtcgagtaaccgctccgccgcgcataaaatctcttctgataacgtggcggagttaatcccgctggctgccatcgacggctggaaatgctcatcttcgccaatatccatcaacagttcctgtaactgcaaaatatcgacattgagacgcaaccctgccagcggcacctctgacgtggcataggtttcgcactcaaacggcaacggcaccgtcagcagcaggtattcattggcatcataacgaaacacgcgttcattgatataaccgattttatgtccggaaaagagaattatgatgccaggctcgtacatcaccggtgtacgtgcgaaaggcgtctcgccatacaacaaacgcacatcgggcaacagttctgacaaactattttctttatttttcagtttattaactttatccgccagcaagcggcaaatctcttcacgtttcatatcgcgtaatttcttaggaataatgcggcaatttgattgtgcgcaattttgtagcatttctccagcactctggagaaataggcaagacattggcagaaatgagcattgagagccagggcgctggcgatcacaatgaaaaacatcaggcagatcgttctctgccctcatattggcccagcaaagggagcaagtaatgaacaactttaatctgcacaccccaacccgcattctgtttggtaaaggcgcaatcgctggtttacgcgaacaaattcctcacgatgctcgcgtattgattacctacggtggcggcagcgtgaaaaaaaccggcgttctcgatcaagttctggatgccctgaaaggcatggacgtgctggaatttggcggtattgagccaaacccggcttatgaaacgctgatgaacgccgtgaaactggttcncgaacagaaagtgactttcctgctgggggttggcggcggttctgtactggacggcaccaaatttatcgccgcagcggctaactatccggaaaatatcgatccgtggcacattctgcaaacgggcggtaaagagattaaaagcgccatcccgatgggctgtgtgctgacgctgccagcaaccggttcagaatccaacgccggtgcggtgatctcccgtaaaaccacaggcgataagcaggcgttccattcagcccatgttcagccggtatttgccgtgctcgatccggtttatacctacaccctgccgccgcgtcaggtggctaacggcgtagtggacgcctttgtacacaccgtggaacagtatgttaccaaaccggttgatgccaaaattcaggaccgtttcgcagaaggcattttgctgacgctgatcgaagatggtccgaaagccctgaaagagccagaaaactacgatgtgcgcgccaacgtcatgtgggcggcgacgcaggcgctgaacggtttgattggcgctggcgtaccgcaggactgggcaacgcatatgctgggccacgaactgactgcgatgcacggtctggatcacgcgcaaacactggctatcgtcctgcctgcactgtggaatgaaaaacgcgataccaagcgcgctaagctgctgcaatatgctgaacgcgtctggaacatcactgaaggttccgacgatgagcgtattgacgccgcgattgccgcaacccgcaatttctttgagcaattaggcgtgcctacccacctctccgactacggtctggacggcagctccatcccggctttgctgaaaaaactggaagagcacggcatgacccaactgggcgaaaatcatgacattacgctggatgtcagccgccgtatatacgaagccgcccgctaagctttttacgcctcaaactttcgttttcgggcatttcgtccagacttaagttcacaacacctcaccggagcctgctccggtgagttcatataaaggaggaacgtatggctaatccaaccgttattaagctacaggatggcaatgtcatgccccagttgggactgggcgtctggcaagcaagtaatgaggaagtaatcaccgccattcaaaaagcgttagaagtgggttatcgctcgtttgataccgccgcggcctataagaatgaagaaggtgtcggcaaagccctgaaaaatgcctcagtcaacagagaagaactgttcatcaccactaagctgtggaacgacgaccacaagcgcccccgcgaagccctgctcgacagcctgaaaaaactccagcttgattatatcgacctctacttaatgcactggcccgttcccgctatcgaccattatgtcgaagcatggaaaggcatgatcgaattgcaaaaagagggattaatcaaaagcatcggcgtgtgcaacttccagatccatcacctgcaacgcctgattgatgaaactggcgtgacgcctgtgataaaccagatcgaacttcatccgctgatgcaacaacgccagctacacgcctggaacgcgacacacaaaatccagaccgaatcctggagcccattagcgcaaggagggaaaggcgttttcgatcagaaagtcattcgcgatctggcagataaatacggcaaaaccccggcgcagattgttatccgctggcatctggatagcggcctggtggtgatcccgaaatcggtcacaccttcacgtattgccgaaaactttgatgtctgggatttccgtctcgacaaagacgaactcggcgaaattgcaaaactcgatcanggcaagcgtctcggtcccgatcctgaccagttcggcggctaacgtgcaaattctcccggtggcggtaatgttccgctaccggacttttcagaaatcatttattcccctcgcgtcccgcccgttgttactcttccttgttcaggaatgccaaatataaggacatcatcatgcagagccggaagctcttaaaagaacaactcatctatatccgggataaacgcaacgggagaggtgaaaaacagatgaaaataatacttctgtttttagcagccctggcaagttttaccgtgcacgcacagcccccctcacagaccgtagaacaaacagtccggcatatttatcagaactataaatcagatgccactgccccttattttggtgaaaccggagagcgtgcgataacttctgtgcgtattcaacaggcgcttaccctgaacgacaatcttacgctgccgggtaatattggctggattatgatccggtttgtgattgtcaggattttggcgatctggtgctagaaagcgtagcgataaccgaaactgacgccgatcatgccgatgccgttgtgcgctttcgtatctttaaagatgataaagaaaagaccacgcagacactgaaaatggtggcggaaaatggtcgttgggtcattgacgatattgtcagcaatcatggcagcgtcttacaagcagttaatagcgagaatgaaaaaacgctggccgctttagcttcgttgcaaaaagaacagccggaagcctttgttgccgaactctttgaacatattgccgattatagctggccgtggacgtgggtggtttccgactcttaccgccaggcggtcaatgccttctataaaaccaccttcaagacggccaacaatcccgatgaagatatgcaaatagaacggcaatttatttacgacaatccgatctgttttggcgaagagtcgctattttcacgcgttgatgaaattcgagtcctggagaaaaccgccgattccgcccgcattcatattcgttttacgctgaccaatggcaacaacgaagagcaagaactggttttacaacggcgcgaaggtaagtgggaaatcgctgattttatccgcccgaacagcggcagcntacttaagcagattgaggcaaaaaccgccgccagattaaagcaatgagctgaattaaatagcaattagccggaacaataaaaaagggaacactatatgaaaacgattttcaccgtgggagctgttgttctggcaacctgcgtgctcagtggctgcgtcaatgagcaaaaggtcaatcagctggcgagcaatgtgcaaacattaaatgccaaaatcgcccggcttgagcaggatatgaaagcactacgcccacaaatctatgctgccaaatccgaagctaacagagccaatacgcgtcttgatgcacaggactattttgattgcctacgctgcttgcgtatgtacgcagaatgataaaaaaatccccggcagcatgtcagttgccggggattttttttaacgtccaaccgccgctttagggcgtttcttcgcaccagcattcaccggacgagattgcgtagacgacgctttttttgccgtagcaggcgtctgacactgggtcgccatcggcgtatgtttcgtcaacgccggacgggtattgcggttctggcgacgagcctcacgcatctcttcaatggttggcgcaggcactaagcaatcgcgacggctgccaatcagatgctttttgcccattgcttccagcgcctggcggattaacggccagtttgccagatcgtggtaacgcaacaacgctttatgcaaacgacgctgtttgtcgcccttcggtacgaagacgtcttcactcttataaccaatcttcgccagcgggtttttcccggtgtaatacatggtggtcgagttagccagtggcgatgggtagaagttctgtacctggtcgagacggaaacgatgctttttcagccacagcgccaaattcaccatatcttcatcacgcgtaccggggtgcgcggagatgaaataggggatcagatactgctctttacctgcctgtttcgagtaggtatcgaacagctctttaaagcggtcataactgcccatgcccggcttcatcatcttcgacaacggcccttcttcggtatgttccggagcaatcttcagataaccgccgacgtgatgggtcgccagttctttgatatagcgcggatcttccacggcgatgtcataacgtacgcctgaggcaatcagaatctttttaatgcctttcagatcgcgagcgcggcgatagaggttgatcgtcggttcgtggttagtgtccatatgcgganaaatatccgggtaaacgcaggacaaacgacggcaggtttgttcagcgcgtggcgatttgcagcgcaacatatacatgttggcagttggcccaccgagatcggaaattacgcccgtaaaacctggaacggtgtcgcggatcgcttcgatctcattaatgatcgaatcttcggaacggctctgaataatgcgcccttcgtgctcggtgatagaacanaaagagcagccgccaaagcagccgcgcataatgttgaccgaaaaacggatcatttcgtaagccggaatacgggcattgccataggccggatgtggcacgcgcttgtacggcagcgcaaaaacgctgtccatctcttcggtagaaagcgggatagcaggcgggttgatccacacatagcggtcaccgtgtttttgcatcaatgcgcgggcgcaacctgggttagtttcgtggtgcagaatacgcgaagcatgggcgtacagcactttatcgcccttcactttctcgaaagaaggcagcaacacgtaggttttttcccacggtttcgggcgcggtggctgcacggttacggctttggcttcctgctttttcggtgccaccggtttgttatccgcgcacggcaaatcttcaccatacggatgcgggattgggtcgatttttccaggggtatcaagacgggtggaatccacgccgctccagccaggcagcgcctctttcacgataatcgcggtattacgcacatcgcggatttcactaatcggctcgcccatcgccagacggtgcgccacctccaccagcggacgctcaccgttaccaaacatcagcatgtcggctttcgaatccaccagcacggaacggcgcacggtatcggaccagtaatcataatgcgcggtacggcgcagactagcctcaataccaccgaggatcaccggtacatctttccacgcctctttacaacgctgggtataaaccagtgtggcgcgatccgggcgcttacccgcgacgttatccggcgtgtaggcatcgtcatgacgtaaacggcgatcggcggtataacggttgatcatcgaatccatgttgccagcagtaacaccgaaaaacagattcggtttacccagacgcatgaaatcgtctttgctgctccagtctggctgggcgatgatcccgacgcgaaagccctgtgcttccagcatacgaccgcaaatcgccatcccgaagcttgggtgatcgacatacgcgtcgccagtaaccaaaatgatgtcgcagctatcccagccaagttgatccatctcttcacgagacatcggcaaaaacggtgccggtccaaaacaggcggcccagtactgcggccaggagaacaggtcgcgatccggttggatcagggagatagagctcattttgcttccagaaatgataaaaaaataatcaaaggccggggattataagccggaacgaaagagaaatcgaaaagtattccatactcgccctcctcgggcgagtatgaagattacggtaccggattgactaacagttgcccaatcgagccacggtccgccatttccagcgtctgactgttgaagtagaacgggaagtgcgcccaggaaggctgaccgaaataaacaagcagctccacttgtccgtcaacccaaacggtatctttccagcctctgtcttccgggaacggcatcgcaccattcacgttacggatctggaacatcacgccttcaatatggaacgcttgcggctcgtccgcgcgtaccgtccagcgttcccacgttccttgctgcgcggtgacatcaatacggttgacgtcccacagttgtccattaatacccgggtcatcacccagactgatatcgcgactgcgaatcggcgaaccggccatgatttcagttggcagcaagcgcatcggaagactgtctgtgaccagcggcagaaggccggttgggcgcagcgttagcaccagggtagaaaccagaatgctggatggctcaaagaagccacgaatacgatcaacaatgctcgccgcttcgccacaggtgatcgacacttcatcaccgttgctcatatccaccagaatctcgcggcgctcgcccggtgccaacgaaagttgcttcaccgatacaggagcaggcaggaatccctgatcgccagaaatcacatgtaacgggcgaccatcgctcatctgtagttgatagcgacgagagttcgacgcgttcagcagtcgcaagcgcacccagccacgcgagacttcaacgtacgggctttgtacaccgttaaccagcagcgtatcaccaacaaagccgccgcttcccggttcgttgtattctggcgtaccaaagttatccagccgtttatcctggataatgaccggaaaatcatccacaccataatggttggggataggcagcgacttgctgacttcatcttccaccagccacattccggcaaggccgttatagacctgctgagccgtgcggttgggagtattggcatgataccacagagtagctgcgttctggcgaataggcagtacgggtgcccagtcagcgtttggcgacatcatccgtgccggaccgcccatcagcgggcctggtacctgtagcccggccaccgtcattgagacattttctgtcaggcggttgctgtaaataagcttaacatcgtcgcccttccagacgcggatagtcggccccaggtaacgaccattgattccccagaccgacgcgcgtgtccctggcgtaaatgaccagtgcgcacgttgtacagtcataaacagcggttgcccacggcgagattcaagcagcggcggaacgggtagcggttgctgttgcccggctgcgctggccttcaggggaacagcgcctgcacaaagtgcaatccccgatgcctgaatgaactgacgccgactgagtgacatatttgctccatgtaaaactggctaaagtaataccgtgcaggaaagtgtttcccgcaaaaatacagattgccgacttaaacttttccggcggcttcgcgctctgcgacttctttatcgagctcggcgattttttgttccattatcgaacgacaatgggcagccagctcacgaacctgatctttgccatactgactgacgtcaattggcggcagcatttcgacaatcaccagaccgttgtgcagtcgattaagattaatcttattcgaagttgtagagacgcacacgggaataatcgggacgcccgccgcaattgccgcgtgaaatgccccagtcttgaacggtagcaggccgcgaccacggctgcgggtaccttccgggaacatccagatggaaatacggcgttttttgaaatgattcactacttccgcaatagtgccgtgagctttagtgcgattgtttctgtcgatcaataagttgccggttaaccagtacaactgcccgaagaaggggatccacagcaagctctttttacctaccgtcaccgtcggcggttgcacaatgttcgatgctgtcaccatgtcatagttgttctggtggttagcgatatagatagcattgccgtagctttcagcatctgcaggtttgcggcactcaactttcaggccgaacagcggcgcaagacgaccaaacatatgcccaaaggtggccacatgtttcgggttacgcgggctgaaaaggcagtaaatggagccgaatacacagactaagatgctgtaaatcacggtaataataagacgaaagatatatagcataacaccctctgaaggtctgagagactggcattgtacgtcacctgaaatcaggttagggcattgttaaaagccgctctctggaaaagcgtattgttaatcgcaacgcatgaataaacaacggtttcaagggaatttttatcgtttccgggggttgaatacgctgccggatgacgacttaacgtttcatccggcgttccttgcaagcgggaggaaacagcgccctccccggcatattactcttcgctatcaccgctgctggcacggcgaggagagtcgatctcaacacgatcgatacgctgcaaaccgcgcatcaacgtaccgcggcgtccacgttcgccagtgactttctgtagctcttccggacgcagtttaattttgcgtttcccaacatgaatggtcagcgtgctttgcggcggcagaacgtacagttgcgccagaccatcctcgccacgcgnggcttctgccgatggaatgttgataatcttgttgcctttgcccttcgacagctgcggcagatcacttaccgggaacatcaacatacggcctgcctgagtgattgccagcagcatatcggaagcatcttcaattaccaccggcggcataacatgggcattttccggtaaggtgatcaaagccttacctgcacggttacgcgccaccagatcgttaaaggtgcagacgaaaccgtaacccgcatcggaagccatcagcagtttctgatcgtcgctttccatcagcatatggtcaacggtcgccccaggcggcaacgttaatttgccggtgagcggttcgccctgaccacgcgccgacggcagcgtaatcggatcaatggcatagctacgaccggtggaatcaacaaacactaccggttggttgctcttacctttcaccgccgctttgaagctatcacccgctttataattcaggcccggcgcgtcgatatcatggcctttagcgctgcgtacccagcccatctgcgacagcacaatggtgacaggttcagacggcagcatgtcgtgctcgctcatcgctttcgcttcttcgcgttcctgcaacggcgaacgacgatcgtcaccgtaggcttgcgcgtctgcctgcagttctttcttcagcaggttattcattttacgctcggaagccaaaatgccctgcaactggtcgcgctctttttccagctcactctgctcaccgcgaatcttcatctcttccagtttggcaagatgacgcagtttcagttcgaggatcgcttccgcctgggtttccgtaaggccaaaccgcgacatcagcgccggtttcggttcatcttcattacgaatgatctcaatcacttcgtcgatattgagaaacgccaccagcaaaccttcgaggatatgcaggcgcttgaggactttctccagacgatagttcagtcggcggcgcacggtatcgcggcggaacaccagccattcggagagaatttccagcaggtttttcaccgccggacgaccatccagaccgatcatattaaggttaatgcgatagctcttttccagatcggtggtagcgaagaggtggttcatcacctgatccatatccacgcggttggaacgcggcacaatcaccagacgggtcgggttctcgtggtcagattcatcgcgcagatcgtcaaccatcggcagctttttgttgcgnatttgcgcagcaatttgctccagtacgcgcgcacctgaaacctgatgcggcaatgcgctgataaccaccgcgccatcttctttcttccacaccgcgcgcatacgcactgaaccacgtccgttctcgtagattttacggatctcggcgcgcgaagtgataatttccgcttcagtcggataatccggcccctgcacgatatccagcagctgatcgagcgtggttttcggctggtcgattaatgcgattgccgcctgagccacttcacgcaggttatgcggtggaatatcggtcgccatgccgacggcaataccggtggtgccgttaagcaaaatgtttggcagacgggcaggtagcattttcggctcctgcaaagtgccgtcgaagtttggcacccagtcagccgtcccctgccccaactcgctcaatagcagctcggaatatttcgacaaccgggattcggtgtaacgcattgccgcgaacgatttcggatcgtccggcgcgccccagttcccctgaccatcaaccagcggataacggtaagagaacggctgcgccatcaggaccatcgcttcataacaggcgctatcgccgtgcggatggtatttacccagtacgtcaccgacggtacgggccgatttt

SEQ ID NO: 1494 - DNA, 33967 bp, Escherichia coli
  Strain O55:H7
  modified_base (2891)..(2891): a, c, g or t
  modified_base (3372)..(3372): a, c, g or t
  modified_base (6688)..(6689): a, c, g or t
  modified_base (6887)..(6887): a, c, g or t
  modified_base (8668)..(8668): a, c, g or t
  modified_base (8734)..(8734): a, c, g or t
  modified_base (10383)..(10383): a, c, g or t
  modified_base (13084)..(13084): a, c, g or t
  modified_base (14961)..(14961): a, c, g or t
  modified_base (15484)..(15484): a, c, g or t
  modified_base (15902)..(15905): a, c, g or t
  modified_base (21238)..(21241): a, c, g or t
  modified_base (25016)..(25016): a, c, g or t
  modified_base (27960)..(27962): a, c, g or t
  modified_base (28485)..(28486): a, c, g or t
  modified_base (28506)..(28506): a, c, g or t
  modified_base (29894)..(29895): a, c, g or t
  modified_base (30163)..(30163): a, c, g or t
  modified_base (33257)..(33257): a, c, g or t
tggcgctggcattcaggcccagttcagacatcgcatacacaatgcggcgctgaacaggtttcagaccatcaccaataaacggcaacgcacggtccatgatcacgtacatggagtagtttaagtaggcgttttccgtaaattcatgtagcgcaaggcgctctgccatatcgctcattaattctgattcctcaacttattcgccagccttcaaaggggcaatattgccggagatactacattatctgccgcgtcgagtcacaggagatcagcgtgaatagcgccgccggacgtgctccgacggcgataaaggcatcaatgtgccttgatatacaactctttgctgtagacataatcctggggattatgcagcggaaaaccgccaacgtagggtttaagcagtttgattaacggctgatagtagataggaatcagcggtgcctgctggttgacgatcacttctgcctgctgatacaacgcattacgctttgtcgcatcagtgatctgcatggcctggtttagtaaggcgtcatactgcgcatttttccagtgaccgacgttttcttcactatcgcttttgagcgtgttcaggaagctggaagcatcattgtacgtcgcatcccacgactgccgagacagcatgaaatcaccggctcgtcgggcatcaagataggttttccactccattgtgcgcagcgtcacctgtgcacccagccattttttccattcggaagacaacgctatcgcggtcttttcatgcagatcgtacttgttgtagaacagctcaaagcgtagcggatgagaggcgtcgtatcccgcctgtttcagcaaggcttttgccatcgcgacgcgctcactcattggcttttgcagttcatcgaacgtcgtcgcgctaaagccttttacctctggcggcgtcagcgtggttgcgggcgttctcaaccccagtaccttttgcgcaataagctgtcgatcaaccgtaagatatagcgcccgacgcactcgcacatcgttaaatggcggtttctcaaggttgaagttgtaatattcgctgttcagacgcggaataattcgtatctcgccaggcagtgatttttcaatggcgggaatttgctgcgccggaacccaggtgagatcgacctctcccgcgcgatagcggttatagccggtgaccgaattatccagcgccagatactcaacctgttgcaatactgtatgttgcgcatcgcggtactttggatttttgcgtgcagtaatcttttcgttaactacccactgatcaagcacaaaggcaccgttgtaaaccatgttctctggcttactccagctatcgccatgtttagcgatgacatgatgaggaaccgggaacagcgtcggccaggcgagcatcgtcgtgaaccaaggaaccggctgctcaagcgtaacttcaagagtacgatcatccgtcgctttgacacccagcgatgtaacatctgctttacccgcaacaatagccgcggcattgttaatgtgcgcctgtgccagatagccagcaaaagggcttgccgttttcgggtcaaccgcgcgctgccagccgaggacaaaatcctctgccgtcagaggctgaccgtcggaccactgcaaaccgctacgcagatggaaaatatagcgcctgccgccgtccagtatctcccagcgttcagcctgagcgggctgcacctggccttcaccgtccatccataccagaccttcaaacagatccagcacaatctgcgcggcagtattctcctccaccttttgcgggtcgagcgtacctgggtcgctatgattgttgtaacgaaagacttgttgcggggcgagctgtgtgttggtgggaacgtcagcagcgtagagaggagccgcacttaccaggctgaccagccataataaatttcgcgtatacatggtattccttaccggagaaattataagcccaacaacaatacgcctgtggcattgttcgctcaaacttatcgcgagtgatttggctcacactccggtaaagattccccatcacgctaacggcacataaacattcgtttccagtcgctgctccgtcaccccttcggcaagattggtgtagtgaaacagaatcggtgctttacgcattttctcgccgcttgcaggcagccagtggcgaataatgccccatatcgtgtgtgaaatatcgtccagctcgccaacgtggcgagccacggcataacgtccaccggtaagttcaccattgctcacaccataacgattatcgggaatcggttcgctaacgctgccgcagatatcaaagcgaaacgcttccggtgcggtggtggcagggtcgtcccaggcgacgccaaaagtctggctttggttaacaggagaaagccccgtctctttacgccacatgataaatttcgccacgctgtagttgagcaactcaggcctacagcggtgcggcaacatcgccacagggattgatgggaaatcgataatgtttacatccagtgtcaggtttgtcatgttgcctccctgcgaaattattcccgggaacgcatcccgggagcggtaacaattacggatttactttgcggatctgtttgacgtcaatttcaacagaattccagtctttatcgacttcaccctgaatctcaaccgtatctttcggcgtcaccgtcacgccgttccagcgtttgtggtcgatatcaacattgatagtaccgctggcatctttgaacacgtagagatcgtcagagatgcgttcaacgatattgccgcgcagggttacccaggtgtcgtcacgcagggattttgcgctttctacagtcgttacgctgccgttcggcccctggaatcctccggcctgactttgcgttgccgatgggccagaaaaaccgccctgntctgctgccatcaccggtgcgctgcacagggccattactgcgattactgctgcgaattttttcatgtttattactccctttaatgtctgtttccgagcatttaacaagatagtccttaacaacttcttaagggaaaaaaataaaatttagtgctgtacagagcgcgttacaacacggtttactagcagcaaatacggttatcgcagggatgaaaaaatgcgaattttactgatagaagatgacatgctgattggcgacggcatcaaaacgggccttagtaaaatgggttttagcgtcgactggtttacacaaggtcgtcagggaaaagaggcgctttatagcgcaccttatgatgcggtgatcctggatttaaccttaccaggcatggatggtcgcgatattttgcgcgaatggcgagaaaaaggtcagcgtgagccggtactgatcctgaccgcgcgcgacgcgctggaggaacgtgtanaagggctgcgtctgggagctgacgattatctgtgtaaaccttttgcgttgatagaagtcgccgccaggctggaagctctgatgcgccgaaccaacggccaggccagcaacgagctgcgccacggtaacgtcatgctcgaccccggcaaacgtatcgccacgctggctggcgaacccttaacactgaaaccaaaagaatttgccctgctggaattactgatgcgtaacgctggtcgggtactgccgcgcaaactgattgaagagaaactgtatacctgggacgaagaggtcaccagtaatgccgttgaagtgcatgtgcatcatctgcgacgcaaactcggtagtgattttattcgtaccgtgcatggtattggctacacattaggtgagaaatgaaatttacccaacgtcttagtctgcgtgtcaggctgacgctaatctttttaattctggcctcggtgacctggctgctttccagctttgtcgcctggaaacaaacaacggataacgtcgatgaattgttcgacacccaactgatgctgtttgccaagcggttaagtacgctcgatctcaacgaaatcaacgcggcggatcgcatggcacagacgccaaataaattaaaacacggtcatgttgatgacgatgcgctgacctttgccatctttacccacgacggcagaatggtccttaacgatggcgataacggagaagatattccctatagctatcaacgggaaggttttgctgacgggcaactggtgggcgataaagatcaatggcgttttgtctggatgacctcacctgatggcaaatatcgcatcgttgttggtcaggaatgggaataccgtgaagacatggcgctggcgattgttgccgggcaattgatcccgtggttggtcgcactgccggttatgttaatcatcatgatggtactactgggtcgtgaactcgcgccgctgaacaaactggcgctggcactacgtatgcgtgaccctgactcggaaaaaccactaaacgcgactggcgtacccagcgaagtgcgaccactggttgagtcgctaaatcaactgttcgcccgcacacatgcgatgatggttcgtgaacgacgctttacctccgacgcagctcacgaacttcgtagcccgttaacggcgctgaaagtgcaaaccgaagttgcgcagctctctgacgatgatccgcaggcgcggaaaaaagcactgctccaattacattccgggatcgatcgcgctactcgtctggttgatcaactgctcacgctatcgcggctggactcactggataaccttcaggacgtcgcggagatcccgcttgaagatctcctgcaatcgtcggtgatggatatttaccacacggcgcagcaggcgaaaattgacgtgcgactgacactcaatgtccagggcatcaaacgcaccggacaaccgctattgctaagtttgttggtgcgaaatttgctggataacgccgtgcgttacagtccacagggcagcgtggtggacgtcacgctgaatgccgataatttcatcgtaagggataacggccccggtgtgacaccagaggcactggcgcgaattggcgaacgcttctatcgcccacccggacaaaccgctaccggcagtggacttgggctatcgattgtccagcgaatcgccaagctgcatggcatgaatgttgagtttgggaatgcggaacaaggtggatttgaggcgaaggtaagctggtaagggtaagacttttgctaaattcgcaaaagactttgcacattttgctaatttcaccgtaccgctctgtgacgtactatagtcggcaaacgtctcaccttgaggttaaaaaatgagcaacatcctgattatcaacggcgcgaaaaaattcgcccactccaatggtcaactgaacgacaccctgaccgaagtcgcggatggcacactgcgcgacctcgggcatgatgttcgcatcgttcgcgccgacagcgactacgatgtcaaagcggaagtacaaaactttctctgggctgatgtggtgatctggcagatgccaggctggtggatgggcgcgccgtggacagtgaaaaaatacattgatgatgtattcaccgaaggtcacgggactctgtatgccagcgatggtcgtacccgcaaagatccgtcgaaaaaatacggttccggcggcctggtacagggcaaaaaatatatgctttctctgacctggaacgcgccaatggaagccttcaccgaaaaagatcagttcttccacggcgttggcgttgacggtgtgtatctgccgttccataaagcaaaccaattcctcggtatggaaccgctgccgacatttatcgctaatgacgtgataaaaatgcctgatgttccccgctatactgaagaatatcgcaagcatcttgtggaaatttttggttaactagagctcaggctttagaaggagttaaccatgcttaccgtaatcgcagaaatccgtactcgtcctggtcaacatcaccgtcaggcggtattggatcagtttgctaaaatcgttccaaccgtactgaaagaagaaggttgccacggctatgcgccaatggtggattgcgctgctggcgtgagtttccagtctatggcaccggattctatcgtgatgattgagcagtgggaaagcatcgcgcatcttgaagcgcatctgcaaaccccgcacatgaaggcgtatagcgaagccgtaaaaggtgacgtgctggagatgaatattcgtattctgcagccagggatttaacattcctgaaaagaggccggtgttgctaccggcctcaggtcagattagccattctttcttcccgttttcagcccccgatggaaatcgttaattcgcttaatggttttaaccgcacgctgcggcaccgcggaagccaccgaccagacaatcatttccaggcacaacaataccgtaccatgtagtggcgttttccccttttcatccccgcgcggaacatgaatcacgatactggcgtctttgctaaaacgtgaatccagcgcgtttgtcagcaaaataacagggatccccagccgtctcgcttcacgcagcgttgtcagcccttcccggtgcgcagatttttgcgccatcatgatcagaacatcgccacgttgaagcgcaatcagttgctcggcaaggccaatacccgtacggtttagtgccgtggcaggcaaacctatgcggttgaatagtcgtgcggtatagtccgccagaatacccgaagcgccaatgccaaaaattgcgacttgccgtgcctgtaccaacaacgctaccgcttgcgnnagcgcgtggcggttttcaggctctgacaggacattacaggtatacaaatgcccttcaagaacaaagtcgattgcggtgttaacatcgctcgtcaagttactcaccgtcgtagacatcttttcgctggaactaagggctggaccaagccactgttccagagtgcgtttcagatcacgcagcccggcaaaccccagggcntgtatagccctgataactgtggcatcggaagtgttcaacgtggccgcaatttccatcgccgtttgatcgagtaccacttcacgatgctcattaatatagctggcgacagctcttaacccaggcgttaactgactcgcgcgagtgcgaaaacgctcaccataaatatcaacccgcgttttgtctttctgaatcatttggcctccggtaaaggtcgccccgcaatttgtgattgtatctgcgcagccatcagccccagagatgcaaaggagttagaaattgcctcttcacgagaaatcagcacataacgcccggaacgacaggcagtcagaaactgacaccatcccggcatgactttttccattgctgccagctcatcctgaggtttaccaccggtgtcaccgcgccaggttgcaaaaacaaaatcggcatccagttcaggtaaacgctccgcgctcacatccattcgcccaccttcaggaatgctctcaatcagcggcggaaagcgaaaaccagcatcgcgtaatacccgccccagcgaatgatagctatgcatcacattaatttttccctgatttgcctgaatcaccgataccgttattttttggctgtccagcgtcgccttcagcgcattgatttgtgcctgatagcggcgttcaagtatcgccagctgcgactgcgttcctgtcagttctgccagcttgcgatagatttctggcgcgccccctttgagatgatcaatgctcaccgtgggcgcaattttttccagttgttcaatgggtgtattacgggtcggttctgtgatgatcaggtcaggctttgccgccacaatcgcttcaatatcaatatcagcggtgccaataaaagcgatcgatgaattatcaaagtcgacacctgtcaataacgcgcctgatcgaatgaaatggctaccgtcaggccgagttcgcccgtggctggcgacaggaggtacaccgagctcaatcagaggaatagtgatatcaagatcgtgtaaagagacaattctctttggatgagcaggaacagtgactttgcgccctaaatcatcagtaaagacctgaacaggttctgtcgcgcgggcaaagaatgacaacagtatcagcagagaaaaaaataaacgcatataactcccattaaaaactgttcctgcgctgccagagcagtagcaaaaagaatggtccaccaatcaatgaaataatgattccggcaggcagttgcaaaggcaaaaaagccaaacgaccaatgctatccgccaggatgactaacaacgcccccgatacggcgctccccagcagtaatgtcgtctgcccgccacgtagaataaaacgtgatatatggggtgctatcaatccgacaaaaccgatgttaccaacacacgaaacgcagacggctgtcaggattattggtgcggcgacacgtaacaacgccagacgagaactattcacccctaacccggttgcaacctgatgaccaagcagagcgatatccgccgtcctggcggtgaacagcaataaaagagcggctggcaacatccaacaggctgaaataccgactaacatccagttagctgcatgcaggcttcccgataaccacatcaatgcagtttgtacatctcgaacatctgcagtggtcataaatacaccgataccggcggcgaaaaaccaggaaacaccaataccaatcagaacaaatcgcgggcgggaaatttcgcgtgcacaaaaaatcacgattaaagccaccaacaagccaccagcaagaccagccantggacgccagaacattcccagcattggaaactggaaaatcagccacagcaccgccacgctacatcnttctttgacgccgattaaaccaggatcggcaaggccgttacgcgcaatggattgcatcgcggcccccgccatacctaacatggctccgcatagcaatgccatgatgactctcggcaagcgaatatcctgcacaatataacgtgcgtctgtgcttacgttttctggagcaaacaacgctcgtcctacttccgatgccgggacaaaaaaagaaccatgcatcagaccgaatatcagtattccaaccgcaaacagaaacagcccaccaagcaacaccagatttttagggcgtaccagtgtcgaaaacttaccaacacgtagtggacgtagcccgacgttcattatccgactcatttgaacattctcgtcgccataatgacaaaaacaggcgcaccaactaacgccgtcatgacaccggtcgctaactcatggggcgtgaaaagcgtccgagcaataatatctgccagtaataacaaaagcgcgccgacacaagctgaaagagggagcagaacgcgcaaatccgctgataccagacgcctgacaatctgcggtactagcagaccgacaaaaccaatggggccagcaatcgatacggctgcgccacagagcaacgcgatcgcaagcagagtgaatgttcgcgtgcggagtaccgagacgcccagcccctgcgccatgcgatcacccagtgccaacatgttaagagagggcgcaaggtaaatggctaacacaaccccccccagagaaaaccaggcggacgtacccagcgtcgcccaatcctgccccgctaaatcacctgctagccatgtccgcatcgccagcagtgtttgttcgtcaagaatcaggattgcagccgttattgaggacacgaacgccgatagcgccacgccgcataaagtaactttcattggcgttagccctgaacgccctgcggaggaaagcagcaatatcaacaggaacaataacgcgccgcccgtagatgccagcagtgggcgtccaaccggaaaggccagcccaagcgcactggcagcaacgacagcaagagcggctccggcatttaagcctaaaatatgtggctcccccaatgggttacgaatgacagcctgcaacaaagcaccagcaactccaagagaagcaccggtaagcaatgctgccgctaaacgcggcaaacggagtcttacaattacgttgtgatcgaagttttgcggttcaaaatgaagaaatgcctgcaacaccgtttgtggtgcaataaatcgggcaccaatccctggatataccacgcatcccacaagcagtaaggcgaggaaaattacagtaaccagccctgtgcgcatcatactttttctacaccacgaaacggcatgaagaacggctttcccgtcagagtatttattgatgcgtgaacatcaacgtcaaagacagcttttaccagctcaggcgtgcaatgctccccctcattcaacacacgcaccactttcccctggcgtaaaaatatcaaagtatcaccataattgacggcaaaattcagatcatgcaacaccacgacgactgtacgcccgtgatgacgcgttaaatcatgtaataactcaagaatttcaacctgataacgtaaatcaagccaggttgtgggttcatccagtaggatataaggcgtnttttgcgccaacaccatcgcaatccagcaacgctggcgctgcccaccagagagtttttcaacaggtaaatgagcaaactcctgcgtaccggttaatttcagggcctcttctaccgcctgctcgtcggcgtcgctccattgacgtatgaaattttgccagggaaaacgcccacgcgacaccagttcataaacggttaagccctccggcaataatggcgactgcggcaagatcccaagtctacgggataacgctttcgttggttgctcgtgaatcgctttaccatccagcaatattgagccgcccatgggttgcaagacacgtgcaatggtgctgagcaacgtcgactttccacagccgtttgccccaaccagaacggtcattttttctgtgggaacggagaaagaaacaccatcaacaatgattttcttgtgatacccggcagaaacattgtcgaggatcagcccctgcccttttgcgttatgtgccacgtgtacgccaacttaatcaaagaaaaacaaaaataaaactcattctcttttgagagtttgacgccacaaaatgtagtagtcaagaagttaaaagccatacaaaaacaaggtaaataacaggtgaaatatttttaaagataaaaataaaatcattaaatattaataaattaccatcaattgaattgcattaacctctcataaaaacacatgtagcaattttttattatttctcatttactactacattactgcatggttgaatgattctcaattacatatccgatggtaaaataacaaacggatagtgcttagtgagcaacaagaaacaattttcactcacgacaatccgtgagtttttgggataacagactaaatggctaagttcacaccttcattctcaggaatcaaaggtcgggcgctcttttcactgctctttgcagcaccaatgattcatgcaaccgacactgcaacgaccaaagatggcgaaacaatcactgttacagcggatgcaaataccgcaactgaggcgaccgatggttatcaacctctgagcacttccacggcgacattaaccgatatgccgatgctggatatcccgcaggtggtcaatacggttagcgatcaggttctggaaaatcagaatgcaacgacgctggatgaagcgctttataacgtcagtaacgtggtacagaccaatacattaggcggaactcaggacgcctttgtacgtcgtggttttggtgctaaccgggatggctccatcatgaccaacggcctgcgaactgtacttcctcgcagtttcaacgccgccacagaacgtgtggaagtgctaaaaggtccggcctccacgctgtatggcattctcgatcctggtggattgattaacgtcgtgaccaagcgcccggaaaaaacattccatggttctgtctcagccacgtcctccagttttggcggaggcactgggcaacttgatatcacaggtcccattgaaggcactcagctggcataccgcctgacgggggaagtgcaggatgaagattactggcgaaacttcggtaaagagcgcagtacatttattgccccgtcactcacctggtttggtgataatgcaacagtaaccatgctctattcccatcgggactataaaactccgttcgatcgtggaacgattttcgaccttacgacgaaacagcccgtaaacgttgatcgaaaaatacgttttgacgaaccgtttaatattacagatggtcagtccgatctggcgcaactcaacgcagaatatcatctcaatagccagtggacagcgcgctttgattacagctacagccaggataaatacagcgacaatcaggctcgcgttaccgcgtatgatgcaacgacaggaacgctgacacggcgtgttgatgcaactcagggatctacccagcgtatgcattctactcgtgcggatctgcaagggaatgttgatattgctgggttctataatgagattctgggtggggtgtcatatgaatattatgatcttctgcgcacagatatgattcgctgtaaaaacgctaaagatttcaatatctacaaccccgtttatggcaataccagcaaatgcacaacggtttcggcgtcggacagtgatcagacgatcaaacaggagagctactcagcttatgcacaggatgcgctctatctgaccgataactggattgccgtcgccgggatccgctatcagtattacacgcagtatgcgggtaaaggccgtccttttaatgtcaatactgacagccgcgatgaacaatggacgcccaaactggggttagtctacaaactgacgccatcggtatccttatttgctaattattcgcaaacatttatgccgcaatcgtcaattgccagctacatcggagatcttccaccggaatcatctaatgcttacgaagtcggggcaaaattcgagctgttcgatggtataaccgcagatattgcgctgtttgatatccataaacgtaacgtgttgtataccgaaagtattggtgatgaaaccatcgccaaaacggcaggccgcgttcgttcaagaggggtagaagtcgaccttgcgggagcattaactgaaaacattaatatcattgccagctacggctataccgatgctaaggttctggaagatcctgattatgcagggaaaccattgccgaatgttcctcgtcataccggttcgntattcctgacctatgacattcataacatgccaggcaataacacactgacgtttggcggtggtggacatggcgtaagccgtcgttcggcaaccaatggggctgactattatctgccaggctatttcgttgccgatgccttcgccgcatacaaaatgaaattgcagtatccggtcacactgcaattaaacgtcaaaaacctgtttgataaaacgtattacacctcttccatcgccacaaataatctggggaatcagattggcgatccgcgtgaagtgcaattcacggtgaaaatggaattttgatcaaaaaagcccggtatacacttgtataccgggctatgttttattcttctggcgggaggattatcagacctcaatctccgccatgtcgcctttctcttgcaaccagttgcggcgatcttccgagcgtttcttcgccagcagcatatccatcatcgcgtcagtacgctgatcgtcttcatcatcgatagtcagctgcaccagacggcgagtgttcggatcaagcgtggtttcgcgcaattgcatcgggttcatttcccccagacctttaaaacgctggacgttcggcttgcctttcttgcgttttaattgctcaagtacgccctctttctcttcttccgtcagcgcgtaataaacctctttcccgagatcaatacggtagagcggtggcagtgcgacgtaaacgtgaccgtgtttcaccaacgcgcggaagtgttttacgaacaaagcgcagagcagtgtagcaatgtgcaaaccatcagagtccgcatccgcgaggatacagattttgccataacgaagctggctcagatcgtcgctgtcaggatcgataccgatcgctaccgaaatatcatgcacttcctgcgaggccagcacttcgtcggaagaaacttcccaggtgttaaggatcttacctttcagcggcatgatcgcctgatattcgcgatcgcgcgcctgcttggcagatccgcctgcggagtcaccttccacgaggaacagttcggtacggttaaggtcctgcgcggtacaatcagccagtttgccaggcagcgccgggccgctggtcagctttttacgcaccacttttttagccgcacgcatacgacgctgggcgctggaaatcgccatctctgccagcaactccgccgcctgaacgttctggttcagccacaggatgaaggcatctttcaccacgcccgaaacgaatgccgcacactgacgcgaagagagacgctctttggtctgcccggcaaactgtggatcctgcatttttactgacagcacataggcgcagcgatcccagatatcttccgccgacaactttacaccgcgcggcaaaatgttgcggtattcacagaactcacgcatcgcgtccagcaggccctgacgcaggccattaacatgggtaccgccctgcatcgttgggatcaggttgacgtagctttcggtcagcagttcaccgccttccggcagccacagtagcgcccagtccaccgcttcagtatcgccagcgaaattaccgataaacggtttttctggcagcgtcggtaaaccgtttaccgcttccgccaggtaatcattcagaccgtcctgatagcaccagcgctgttcggtgttgttgatctcatctttaaaggtaatctcaacgccggggcacagtactgctttggctttcagcacatgcgtcaggcgtgaaacagaaaaacgcgggctatcgaagaaggtttcatccggccagaaatggacgctggtgccggtattgcgtttaccgcaattgccgacaacctgtaaatcctgcaccttttcgccattttcaaaggcgatgttataaacctgaccatcgcggcgcacgttaanttctacgcgcttcgacagggcgttaaccaccgaaatccccacgccatgcaggccgccagagaactggtaatttttgttagagaatttaccgcctgcatgcagacggcaaagaatcagttcaaccgccggtacaccctcttccgggtgaatatccaccggcatcccgcgcccatcgtcaataacttctaacgactggtcagcatgtaaaataacgtccacgcgttttgcgtgacccgccagtgcttcatccacactgttatcaatgacttcttgccccaaatggttagggcgagtggtatcggtatacatccccggacggcggcgaaccggctcaagcccggtgagtacctcaatggcatcagcgttataagtttgcgtcatggtttaagttagcaattcgagttgatcgtcagagatggtgcagaccaagaaaatcgacgatcgggttgaaataatcttcgaagcccgtgaatgcgtggttgccgccttctatgacagtctggcggcaggaagcgtagtacgncaccgcctggcggtaatccagcacttcatctcccgtctgttgcagcagccagatcaaatccggcgcttccagcgggtcaatctgcatgactttaagatcgtaaatatggcgtgactctagcacatattgctgcccggtgtaggggttctcgttctgaccgagatagtccgtcagcagttcaaacgggcgcaccgccgggtttaccaccactgcgggcagcataaaacattgtgacaaccaggtggcgtaatatccccccagtgacgaaccgacaatacccagcgaatcgccgccatgttccaggacaatggattccagcagctctgccgcgtcggaaggatacggcggcaactgcggaatgatcatctcaacgtcagggtgatgttccgccagccagttttttaacaagctcgctttnnnngagcgcggcgagctgttgaaaccgtgtaaataaagaagcgtagacatcagtagccttctgaagcggtatcaggttggaaacgtgtgtccgccaggcgatgcacctcggtggtcagcgtgccatcagcatgtaactcgagagtacgccagccgggcgcgatagtatccagcgtaaagttggaacagtgcggcttaaactgcacacaggtcgacggcgttgccagcaggcggcgaccgttccagtcgagatccagctcctgatgaatatgaccgcacagcaagtatttgacgtgcggaaacttcgccagcacggtatccagttcgcccgcgttacgcaggctgtgttgatcaagccaactacaacccgcaggtagcggatgatgatgcagcagcagcaacgtatggcgctctggcgcatcagccagtttacgttccagccactcaagctgaaactcgcttagctcaccgtgcggcacgccaaacacctggctatccagcaacaggatttgccattgctcaccaataaacacccgcttcgccggggagatacccgcatcctgtaacgcgctgtacatcgcgggctggaaatcgtggttgcccggcagccagacgcagggcgcacgaaaacttgcgatgccttcagcgaaatgctgataggccgcagaggattgatcctgcgctaaatcacctgtcgcgacaatcaggtcgaattcgtgctggtgtggacgaatcgcctccagcaccgcctggtagctttcccaggtgtttacccctaagagggcttcgtgcttttgtgcaaacaggtgagtatcggtaatttgtaaaatcctgactctggcctcaccagccagaggaagggttaacaggctttccaaatggtgtccttaggtttcacgacgctaataaaccggaatcgccatcgctccatgtgctaaacagtatcgcaaccagtccgctaaaaactggttaatttgatgcttttcgtcgcgttgatgcaactttttattaggataatcataccgcgctttgaagcgaaaaatctgctggcttgaacacacttcagccaccatcgcgtcatgatacagacgcaccgtcattgacggaaggctccagtaactgatcgcgggcgcagtctgttctattgtcaccagggtagtgtatcgggtcgattccacaatcgtcagccgatattgtgcgtttgccacctgatagcttacagtttcgccgggtgcgtcattgcgcggtaacaaacggcgcaattgtgaaaagttcatctcgcacaggcgcatcatttcaggaaagtcaggtgtgtaacgcttcatttatgcccactcattttttaacgcttgatgatgcagctgcagccattgcaaagcgatgaccgacgctgcgttgtcgattttcccctcttctacccactggtatgcctgttcccggcttaccacatgaacgcgaatatcttcgttttcatcagccagaccgtgaataccgcttgcggtcgtggcgtccacttcgcccaccataattgacgaacgctcactggtgccccccgggcttgccaggaaacttaacaccggtttggtccgtttgactatcagccccgcctcttcaatcgcttcgcgacgggcaacatcttccacactttcaccctcttcaatcattccggcaaccatctccagtagccaaggggtttcgctagtgtcgtatgcggcaattcgaatctgctcaatcagcacaacttcatcacgcactgggtcaaagggtagcaagactgcggcgtgaccgcgctcaaaaatttcccgccgtacctcatgactcatttgcccgttgaatagacgatgacgaaatctataaagatctaatgaaaaaaagccgcgataaagtgtttctcgtgcaataatttctacatcgtttttgccaaatgtaacgggcaggttgtctggcttaagcattgttaatgtcctggcactaatagtgaattaaatgtgaatttcagcgacgtttgactgccgtttgagcagtcatgtgttaaattgaggcacattaacgccctatggcacgtaacgccaaccttttgcggtagcggcttctgctagaatccgcaataattttacagtttgatcgcgctaaatactgcttcaccacaaggaatgcaaatgaagaaattgctccccattcttatcggcctgagcctttctgggttcagttcgttgagccaggccgagaacctgatgcaagtttatcagcaagcacgccttagtaacccggaattgcgtaagtctgccgccgatcgtgatgctgcctttgaaaaaattaatgaagcgcgcagtccattactgccacagctaggtttaggtgcagattacacctatagcaacggctaccgcgacgcgaacggcatcaactctaacgcgaccagtgcgtccctgcagttaactcaatccatttttgatatgtcgaaatggcgtgcgttaacgctgcaggaaaaagcagcagggattcaggacgtcacgtatcagaccgatcagcaaaccttgatcctcaacaccgcgaccgcttatttcaacgtgttgaatgctattgacgttctttcctatacacaggcgcaaaaagaagcgatctaccgtcaattagatcaaaccacccaacgttttaacgtgggcctggtagcgatcaccgacgtgcagaacgcccgcgcgcagtacgataccgtgctggcgaacgaagtgaccgcacgtaataaccttgataacgcggtagagcagctgcgccagatcaccggtaactactatccggaactggcggcgctgaatgtcgaaaactttaaaaccgacaaaccacagccggttaacgcgctgctgaaagaagccgaaaaacgcaacctgtcgctgttacaggcacgcttgagccaggacctggcgcgcgagcaaattcgccaggcgcaggatggtcacttaccgactctggatttaacggcttctaccgggatttctgacacctcttatagcggttcgaaaacccgtggtgccgctggtacccagtatgacgatagcaatatgggccagaacaaagttggcctgagcttctcgctgccgatttatcagggcggaatggttaactcgcaggtgaaacaggcacagtacaactttgttggtgccagcgagcaactggaaagcgcgcatcgtagcgtcgtgcagaccgtacgttcctctttcaacaacattaatgcttctatcagtagtattaacgcctacaaacaagccgtagtttccgctcaaagctcattagacgcgatggaagcgggctactcggtcggtacgcgtaccattgttgatgtgttggatgcgaccaccacgctgtacaacgccaagcaagagctggcgaatgcgcgttataactacctgattaatcagctgaatattaagtcagccctgggtacgttgaacgagcaggatctgctggcactgaacaatgcgctgagcaaaccggtttccactaatccggaaaacgttgccccgcaaacgccggaacagaatgctattgctgatggttatgcgcctgatagcccggcacccgtcgttcagcaaacatccgcacgcactaccaccagtaacggtcataaccctttccgtaactgatgacgacgacggggcttcggccccgtctgaacgtaaggcaacgtaaagatacgggttatctgccgcattcttcccccttctcgcttcaatttcgaccagccatcctctattctgatgggtatttaccacaggtcccggaagacaaaaatgaaacggacaaaatccatacgccacgcatcgttccgcaaaaactggagcgcacgccatctgacaccagtcgctctcgcggttgccactgtttttatgctggctggctgtgaaaagagtgatgaaacagtgtctctctatcaaaatgctgacgactgttcagctgcaaacccaggcaaaagcgccgaatgtaccaccgcgtacaacaatgcgctgaaagaagccgaacgtactgcgccgaaatacgccacccgtgaagactgtgttgctgaatttggtgaaggtcagtgccagcaggcaccagcccaggctggcatggcaccagaaaaccaggcgcaggcccagcaatccagcgggagtttctggatgccgctgatggccggttacatgatgggtcgtctgatgggcggcggtgcgggatttgcacagcagccgctgttctcctcgaaaaacccagccagcccggcttacggtaaatataccgacgcgacgggtaaaaactatggcgcagcccagccaggccgcaccatgaccgtaccgaagacagccatggcaccaaaaccggcgaccaccactaccgttacccgtggcggttttggtgaatctgttgccaaacaaagcactatgcagcgtagcgcaaccggtacctcttctcgttcaatgggtggctgataccgatggaaagagtcagtattaccgagcgcccggactggcgtgagaaagcccacgaatacggtttcaattttcacaccatgtacggcgagccgtactggtgtgaagatgcttactacaagttgaccctcgcccaggttgaaaagctggaagaagtcaccgccgaactgcaccagatgtgcctgaaagtggtggaaaaagtgatcgccagcgatgagctgatgaccaaattccgcattccaaaacacacctggagttttgtgcgccagtcatggctgacgcaccagccatcgctttattcgcgtcttgatctggcgtgggatggcactggcgaacctaaacttctggaaaataacgccgatacgccaacgtcactatacgaggcggcgttctttcagtggatctggctggaagatcagcttaacgccggtaacttgccggagggcagcgaccagtttaacagtctgcaagaaaaactgatcgatcgcttcgttgagctgcgtgaacagtatggcttccagttgctgcatctcacctgctgtcgcgacacggtggaagatcgcggtaccattcagtatttgcaggactgcgcgacggaagctgaaatcgctaccgagttcctctacattgacgatatcgggttaggtgaaaaaggtcagttcacggatttacaggatcaggtaatttccaacctgttcaagctgtatccgtgggaatttatgttgcgtgagatgttttccaccaagctggaggatgcaggcgtacgctggctggaaccggcgtggaagagcattatctccaacaaggcacttctaccgctactgtgggagatgttcccgaatcacccgaacctgctgcccgcttattttgcggaagnnnntcatccgcaaatggaaaaatatgtggttaaaccgatcttctcccgtgaaggcgcaaacgtgtcgatcattgagaacggcaaaaccattgaagcagcggaaggtccgtatggcgaagaagggatgattgttcagcaattccacccgttaccgaaattcggcgacagctatatgctgattggtagctggctggtgaacgatcaacccgccggaattggcattcgtgaagaccgtgcattgatcacccaggatatgtctcggttttatccacatatttttgttgaataatcaatgatgccggatggcattcgccatccggtaattgttaacctatctgcaccgacagcatacttaaactgcccatttctataccatcgaccggaatggtaattggctcctgcccatcccacgcacctaagacatacagcaacggcagatagtgctctggcgttgggttcgataacgcgccaccttcatggtcgagataattcaccagaggatgctgctctaccggcccttgccacgtcagattcgctttcacatactcattaaacgacatcgcccaaggatacggtgaactatcaccgtgccacttcactgtacgcaggttatgcaccacgttgccgctggcgaccaacattattccttcatcacgcagcgccgcgagttttcgccccatttcgaaatgccaggcggcaggtttgctactgtcgatactcaactgcaccatcgggatatccgcgtcaggatacatcttaatcagcacgccccaggaaccgtggtcaaagccccaggcttctttatccagcgtcaccgggatcggcgctaacagctcaaccagacgctgtgccagcgcaggcgaacccggagcaggataatgcgtatcgtacagcgcctgcgggaagccaccaaagtcatgaatcgtgggcggcgtctccatcgcggtcactcctgttccacgggtaaaccagtgagccgaaactaccacaatcgcttgcgggcgtggcaatgtcatccccaacgtctgccagctgcgggtatacaaattatcttccagcacgttcatcggactaccgtgacctaaaaacaatgctggcatacgtgttgaagacatgatgatatccttaactaaaggtgtcattttgatatcctcacgatacgcttgttcggcggagtaagaacccggataacaatgatgatgatcatcagttattttgacgatctgcctgaaggtgaagatttataaggagttgtcgatgtcagtacctctcattctgaccatactggcgggggcagccacgtttattggcgcgtttctcggcgttctcgggcaaaaaccctcgaaccgcttactggcgttttcgctaggatttgcggcggggatcatgttgctcatctcattaatggaaatgcttcctgccgcactagcagctgaaggaatgtcgcctgtgttgggttatggaatgtttatcttcggtctgcttggctattttggcctggaccgcatgttgccgcatgcgcatccgcaggatttaatgcaaaaatcggtgcagccgttgccaaaatcgatcaagcgcacagccattctgctcactctcggcatcagtctgcataacttcccggaagggattgccacctttgtcacggcgagcagcaacctggagctgggatttggcatcgcactggccgtcgcgttgcacaatattcctgaaggtctggcggttgcaggcccggtttatgcagcaacgggttctaaacgcacggcaattctgtgggcggggatttctggactggcagaaattcttggtggtgtgctggcgtggttaatcctcggtagcatgatttccccggtggtcatggcagcaatcatggcggcggtcgcaggaattatggtggcgctctcggttgatgaattaatgccgctcgccaaagagattgaccctaataataaccccagctatggcgtactatgtggaatgtcagtgatgggattcagtttggtgctgctacaaacggcgggaattggttaaaagcaacatcagaagttgtccagcgcagggacaacttctgctagtttcactaaagccttattctaccttttcggctgtctcttctctcgtactgtttaagtatttgttccgcgcttcaagcagtgcgtctctgtcctggcgaaatgcccgacaataacgtttcaaatgcaggaaataacccaccacaaccagaacaatcaatacaatccagtaccaggcgataaacatccttttacccttaatatttaacaatactaaacatttagcgcataaatttcacatatcctttttcggatatattcatatggtcgcataataacggaacaattatatgattttgatcataatgaaaaagaatgcctgatattaatgaaattttctcatagaaagagaagcggaattaacatcttgcatagtagggaaaaataaaaaccgaagcctgctacaacttcggtttcttgattaaggcagtaaattaagcagcggttttcagctggctttacgctcatgtgcctgacggtatgccaccaggtcttcaatagtcacgagcgccatgttgtgtttattggcaaactcaatgcactctggtgcacgcgccatcgtgccatcgtcattagtcagctcacacagcacaccagccggtttgaagcctgccagcgtcattagatcaatagttgcttcagtatgaccgccacgcgtcagtacaccaccagcctgagcgcggagtgggaaaacgtggcccgggcgattcagatcagaaggttttgcgccatcggcaatcgctgcgcgaacggtcgtaatacggtcagcggcagaaacaccggtagtcacaccttcagccgcttcaatggtcacggtaaaaccggtgccataggcgctggtgttattttctaccatcattggcagatcgagttgtttacggcgatcttcagtaatgcacaggcaaacaataccactaccgtggcgaatggtcagcgccatctgctcaacagtcatggtttctgccgggaagatcatatcaccttcgttttcacggtcttcatcatcaagcaccattacaccgcgtccttcacgcagcgcagccagtgcattttcaacacgttcgaaaggcgtaccaaaagaggaaagtagcgtctgattcatggtaaaaaaacctcactaaaattatggttaccagaatcagggcagtcttaggagtggcggcatatagccaaaataacgtgagcgggtccatgcccgacagaatcgttactctctcccatccggactctaaccgtcggccccggaattacaccggatctgctgtcctttgagttcgcacccaaagcgctcgcgggctttcaactgagttgatttaccgccggtggggaatttcgccccgccctgagaataagcggattcactataacgctaatgattagcggcagcaacgcatagcttcacataattctggtttatgacttacccttatcgcactacaatggcactcaacacctatcagtacagggaaactacaatgattgacccgaaaaaaattgagcaaatcgctcgccaggttcacgaatcaatgcctaaaggaatcagggagttcggggaagatgtggagaaaaaaatccgccaaaccctacaagcgcagctgacgcgtctcgatctggtaagccgcgaagaattcgacgttcagacgcaagtcctgttgcggactcgtgaaaaactggcgttactggagcagcgcatcagtgaactggangcgcgcaataattcggtagcagatcttcaatctcctccggctatcccgcctattgataaagcagaataaagcaacacaaaaacgggccagacggcccgtaatatcagtgttctaattcaagttctctggtttgcatcatctgttggcaataccaggcataacgtgcgcaaaaccaggttctatgttcttcatccatgttaccagtaacggccagaatatcgaccgggcgaccttctgcgtgcattctggcaaaactacgcgccaggaaatcgaaattatttaaagaattaagactatgatccataagcacatcctccggttatcgcataccttttaaggccatatgctttttctgatttcagtattccccaatcagtgtagtgcctttaaacataacgtgcgtaaatatattgtccccgatcacactttttagtgaaaaataaaaaaccatattaaaagactttctcttccagaacttctctaacatgtgttattattaacaaagacaaatgtaagcaaggaaactatcacaaagtaaatattgcgtcactaaatggacattggagtgacatatgattttattcgccgactataacaccccttatcttttcgctatttcctttgtactgttgatcggccttttagaaatttttgcgcttatctgcggtcacatgctctccggtgctcttgatgcacatcttgaccattatgattccataaccacaggtcatattagccaggcacttcattatctcaatatcggaagattgccagctctcgtcgttctttgcttactggctggtttttttggtcttattggcatcctgttgcagcatacctgcatcatggtctggcaatcaccactctcgaacctgtttgtggttcctgtcagtttactatttacgattattgcggtgcattataccggtaaaatagttgcgccctggattccacgcgatcatagctcagctattacagaagaagaatatattggtagcatggcgttaattaccggtcatcaagccacttcaggtaatccctgcgaaggaaaactcaccgatcattttggccaaatacattatttactactggagcctgaagaaggaaaaattttcactaaaggagacaaagtgttaattatttgccgactttctgcaacgcgatatttggcggaaaacaatccctagccccaaatattgtaatttattaatcaaaaggaaatttaataatggatgatattgttaattccgtgccctcctggatgtttaccgcgattattgccgtatgcattctgtttattattggaattattttcgccaggctctatcgtcgcgcttcggcagagcaagcatttgtccgtaccggcttaggggggcaaaaagtggtaatgagcggtggcgcaatcgtgatgccgatctttcatgaaataatccccatcaatatgaatactctgaagctggaagtcagccgctcaaccattgatagcctgattacgaaagatcgtatgcgcgtcgatgtagtagtcgctttctttgtgcgggtaaaaccttcagtagaagggattgccaccgctgcccagacgctggggcaacgcaccctgtcgcctgaagacttacgtatgttggttgaagataaatttgtcgatgccctccgtgcaacagctgcgcaaatgaccatgcatgagttacaggatacccgcgagaacttcgtgcagggagtacaaaataccgtagctgaagatctgtcgaaaaacggcctggaactggaaagcgtttcacttaccaactttaaccagacctcgaaagaacatttcaatcctaacaatgcctttgacgccgaaggtttaaccaaactgactcaggagacggagcgccgtcgccgcgagcgtaacgaagttgaacaggatgtagaagttgcggtgcgtgagaaaaaccgtgatgcactttcgcgcaagttggagattgaacaacaagaagcgtttatgacgcttgagcaggagcagcaggttaaaacccgtaccgctgagcagaatgcgaaaattgcggcttttgaagctgaacgtcgtcgtgaagcagagcagacgcgaattctggctgaacgacagattcaggaaacagaaatcgaccgcgaacaggccgtccgctcaagaaaagttgaagctgaacgtgaagttcgcattaaagagatcgaacagcagcaggtcaccgaaatcgctaaccagacgaaatcgatcgctattgccgccaaatcggaacaacagtcccaggcagaagcgcgtgctaaccttgcactcgcagaagcagtaagcgcccaacaaaacgtagaaaccactcgccagacagccgaagccgatcgtgccaagcaggtggcgctgattgccgcagcacaggatgcagaaaccaaagcggttgaactgaccgtgcgggcgaaagcagaaaaagaagccgcagagatgcaggcggcggcgatcgttgagttagccgaagctacgcgtaaaaaaggcctggcggaagcagaagcacaacgtgcgctgaacgatgctatcaacgtactttctgacgaacaaaccagccttaaattcaaactggccttgttgcaggcgctacctgcggtaatagagaaatccgtggaaccaatgaagtccattgacggtatcaagattattcaggtcgatggtctgaatcgtggtggtactgcgggggatgcaaacacgggtaatgtggggggcggaaacctggcggaacaagcattatcagccgcactctcttaccgcacacaggcaccactgattgactccttgctcaatgaaattggcgtttcaggcggctcactggctgcattgacttcacccttaaccccaacaactcccgtcgccgaaaacgtagaataaattttcagctatgaacatccctggctcaaaaagccggggattttttatatctgnnntccgctaaaaggtgcaaatgatcaggctgttgcagcgttttgcgtgattgctcggggaaggcaaaactgcttcagggaaagcgttgcgcggggtccggcgctcatcaacaatcggggagtaagcaaagggctgaaacgggaaagcccctcccgaggaaggggccttacagaaggaaagggttatgatgaagctcgtcatcatactgattgtgttgttactcgtaagtttcgcagcttattaacagccaatcagaggggggagaaatcctccctcacccttgttcctttactttaggttgaaaaaaaatcagcgtcaagaaggtttcattaacacatatccctggcccaaaaagccggggattttttatatctgcgttccgctaaaaggtgcaaatgctcaggacgttgcagcgttttgcgtgaccgctcggggaaggcaaaactgcttcagggaaagcgttgcgcggggtccggcgctcatcaacaatcggggagtcagcaaggggctgaaacgggaaagccnntcccgaggaaggggccttanagaaggaaagggttatgatgaagctcgtcatcatactggttgtgttgttactgttaagtttcccgacttactaacaactcatcagaggggggagaaatcctcccttacccttgttcctttactctaggttgaaaagacaacagcgtcaataggcctgccatgtacgaagcgagatctgtgaaccgctttccggttagccttttttatcctgttggatcttcttgataatgttagtggtcgagcaaccgtcttcaaagttgagcaccaacacttcgccgccgttggcccagacttctttactcccggcgatctcttccggtttgtagtcaccgcctttcaccagcaggtctggcaggatcccggcgatcagacgctgcggcgtgtcttcttcaaacgacactacccagtcgaccgcttccagtgcgcccagcacaatcatacgctgttcgagtgggtttaccgggcgggaatcccctttcagccgtttggtggaggcatcgctgttgacggcaacaatcaagcggtcacccagcttgcgggcatttgccagataagagacgtgcccggcatgtaggatatcgaagacaccgttggtcattaccactttttcaccacgtttacgcgctgccactacagccagcttcagttcctcttcggtcatcacgccaaagccggtatctgcgcgtccacgtacagcgttttccagctcgatcggcgaaaccgtggacgtccccagtttgccgaccaccacaccagccgccgcattggcaaagaagcaggcttcttccagcgaattacccgctgccagcgttgccgccaggacgccaatcaccgtgtcgcccgcaccggtaacgtcatacacttcctgcgcctgagttggcatatgcagcggcgctttacccggttgcagcagcgacataccctgttcggaacgggtcactaacagagccgagagttcgtaatcggcaatcagtttcatgccgcgctcaacaatctcttcttcggtcttacatttaccgacaacagcttcaaattccgagagattcggcgttaacagcgtagcgccgcggtagcgctcaaaatcggtaccttttggatcaatcagcaccggaacacccgctttacgcgccagttggatcatctgctgtacgcttgccagcgcacctttggcgtagtcagaaagcaccagcgcgccaatcgaactcagcgcctgattaatccgctcgtgcagcggctgcagatcaacaccttcgaaaccttcttcaaaatccagacggatcagctgttggttgcgggaaagtacccgtaatttggtaatggtcggatgcgtcggtacagaaacgaagtcgcatttgacgttgacgtcggccagagatttactcagcgcnngcgctgcatcgtcaatgcccgtcaacccgaccaggcgtgcattagcaccgagagaagcgatattcatcgccacgttagccgcgccgcccggacgttcttcgatggtattcactttaaccacgggcaccggcgcttccggcgagatacgactggtggggccgtaccagtaacgatccagcatcacatcaccaaccaccatcactcctgcacgttcaaactctggcagcgttactttcattcctgtctcctgagagattcaaaatttgcncgcgataataccatacttcattcttccaccagccacttctgccagcttgcccgcaccagttcacgctctgcggtgaagcaatcctccggcacatggcccggcaattcctgtaatgccagatgatgaagttcatcgcgaagcgtagtgtaagcacgggtcagcgccatcgcttcctgctcttccataatgtcgttttgcgccagtagttccagaatgcgcacgttgtctgaccagcgcgttaacttcggtttttcatgagcgtagcgcaacaccagatattgggtaataaattcgatatcggtaattcccccttcatcagctttgatatcaaagcgatcgcgatgtttattgccgagatgagcgcgcattttctcgcgcatttcccgcacttccgtttgcagagttttaccttcacgcggcagcgtcataatctcgcgacgcactgcgtcaaagtgcgcggtgagctgcggatcgccgtacactacacgcgcacgcaccagcgcctgatgctcccacgtccaggcctcgtttttctgataatcggcaaatgcttctgtggaggtaaccagcattcccgccgccccggacgggcgcagccgcgcatccacttcgtacaaaatgccggaagaggttcgcgtgctgaacaggtgcataatgcgttgcgccagacgcagataaaactgtcgtccgtcgatttcccgctcgccgtcagtcatcgcatccattgggcaatcatggaggaagatcaggtcaagatcggaactgtagcctaactcccagccgcccagcttgccgtagccgaccactgcaaaaccacgcccttcgcgttcgttcaggtgattcggcttaccgtagcgggcaaccatttgaacccacgcctgctgaacgacggcatctatcatggcttccgccagccaggttaagtgatcgctcactttcatcaccggtagcgtaccggcgatatccgctgcggcgatgcgtaacagctgcgcctgtttgaactgacgcagcgcctcaagctgttgctcttcgtcatcttccggcacgcgcagcaaatactggcgcaactcatcgcggtaggcatcggtcgccgtcggctggtaaagggtgtttggatcgagcaattcatccagcaataatggataacgcgccagctggctggcaatcatcggcgacgctgcacacagagaaatcaaatgtttaagcgccgcggggaattcactgagcaattctaaataggtggtgcgggtaacaatccccgccagcaaggcggtaatgcgcgacagcgtaacggcagcgtcttcacgcgcacagacatcacttagcagatgcggcatcagatggtcgagcacctgacgcccgcgtggcccgattgtgcgcttatccagctctttgcggaaatcggcaatcagcgtcagcacctgtttgcgatcgtcctcgctaagatgcgccagcactggtgtagtgtcatcttcctgcaacgcatcctgccacagctcgcgccactgttccgacagcgactcttcctgagtttcactttcgtcgtcgccaatcaattcattaaacacccggcgcacattggtcatatgtgcggtcagcgccccggtcaattgcggccagtcagcaaagtccatcgcccacgccagccgcgcacggttaagctcatcagaaggaagcgtctgggtttgttcgtcgttaatgctttgcagcaggttttccagacgccgcaggaacagatacgccactcgcaattgttcagcatcgttttcagaaagcagatgcagcgcggcaatgacgctgagcgttggcagtaaagagcgcgactgcagcgacagttcgcgcccgccgcgaatgagctggaacacctgaacgataaattcaatttcgcgaatgccgcctgcgccgagtttgatattgtcggtcaaaccacgtcgacgcacttcacgggcaatcattcctttcatgttgcgcagcgactgaatcacgctgaaatcgatgtaacgacggaaaacaaacgggcgcagcatcgcacgcaactcgttagcatagacgccttcgctatcgcccataatccgcgccttgaccatcgcgtaacgctcccagtcgcgcccctgctcctggtaataatcttccaacgcggcaaagctcagcaccagcgggccactttcgccaaacggacgcagccgcatatccacgcgatagacgaagccatcctgcgttggttgatccagcactttaatcagccgctgccccatgcgggtaaaaaactgcgcgttatccagttcccggcgtccaccctgcgtacaaccatgttccggccaggcaaaaatcagatcgatatcagaggagaaattcagttccccgccgcccagcttacccatgcctaaaatcagcagcggttgcgcttcgccctgcgcattgcacggcgttccccactcgcggcagcaggcgtcatatagccagtcacgcgccgcaacaatcagcgtctccgccagatagctgagctgctgcaatatgctctcttcagtaaccagtgccagcgtttgcgcccaggcgatacgtaccatgatgcgccgacggaacagccgcagctcgcgcattaacccggcttcgtcactcacattaatgagcgcctcctgcaaccatgcaacgtaatgctgccattcgtcggcctgcggcggttggctttccagttccgtcagccactctggatgcgcacttatgctgtcctgcacaaaatcactgaaagtaagtactgacttcgcctgtgcactaagtgattcctcggctaaaggctctggcagccgctcaacaatggtctgccagtactgctgtaacggtgaagagagcggcttcataagcgattttatccttgcctgattaacgttttccgctgtgcaaccagaacggttcctgattgtttgcctcattacggaaatgttcaatttcgatgcgttgcccggtcgcaatagcgtgatgcagcccctgccagttctccagccaggcttgcgcgacgacaggatcatagtaacccgccagcaacagtattgagtcaatatcacgcgtcaggcgtggcaactggtcacggtagcgntcgcctaacggctggcagaaaacgcttttcagttcagcggcatggcgggaaagatggatatcggcaaagcgtttgaaggagtcgctgattttgccctgcgctttggcatctaaaaatggctgccatgctttgcttaccaaccattcggtcaacgccagcttcgccattgccgtttcggtagagtagaccgccgtcacggcagaaaccgcagaagcaatggtcgcttcgcattgggtcagcaaatcacgtaagtgagtgctcgctttacgcggcacaataccaccgaacagcatcagcgtatgacggaccaagctaatggctgccagcacctgttctttcgccgcatcgttgccgcgtacccacagttcttcatgatactgccattgcgctaacgccagctcgagcgccgcttccagcccctgttccacatcggcttttgccgcaacatgcaaaatggtggtcggtttgatttcacgcgccggattgccctgcgccagatgatagccacgcgccgctttgctcaggctgccctggcgtaatccggtttgcgataccagttggttcgccagtttcagcaccgcgcgcgtgtcgccgctaagcagctccagttccagctcacagataggttcagcaaattcccccgctttcacctcaccctgatcgagagcgatttcaattcggctgccatcgaccgccaccagccatttttc

SEQ ID NO: 1495 - DNA, 1898 bp, Escherichia coli
  Strain O55:H7
  modified_base (750)..(750): a, c, g or t
aaaaatcggtgctgaacagcggttgtacgcgggaagcgagatcggcgggcaattcgccgttcggccagacttccgtcggtaactgcgccaggtcgagcgtcggttcgctcaacgccacgttatattccgggcgctggtgtaagccgcctgtcactcttcctgcaactttcatggtcatctcatagcgaccgttttcgccacgaatacgtaagcccatatcgtgcccacgcagccagttatccggcgtttcgtagtaaatattcagtaactgcacggggtcatggtgctcgccgcccagcgtattgagatggtcacgcaacgcctcaacggcgctgtgattaacaataaactttaattcgatttcctgagccatggcctttacttatcggttatgtcacataagtgacgatgaacggcgaacttaatgcgatcttttttgtcagtagatagtattttgcgccaaattgccatgcaacgggcaatttgacgggcgtaaaagtttgaagcagtggcaagacctgacacagaggattccgattgatgtcgaatgctttgcgtagcgacactgatgccactactatcgttccactttccatgacaataacgacagcctgatgccaaaattacgcctgatcggattaactttactcgcacttagcgcgactgccgtctcacacgctgaagaaacgcgctatgtttctgacgaactgaatacctgggtccgtagcggtccgggagatcattatcgcntcgtgggcacggttaacgccggcgaggaagtgaccttattacaaactgacgccaacaccaattatgcccaggtgaaagacagctctggccgtaccgcctggatcccgttgaaacaacttagcactgagccaagcctgcgctcccgtgtgccagatctggaaaatcaggtcaaaaccctgaccgataaactcaccaatatcgataacacctggaatcagcgcaccgcagaaatgcagcaaaaagtggcgcagagcgacagcgtgatcaacgggttaaaagaagaaaatcagaaactgaaaaacgagctgattgtcgcgcagaaaaaggtcgatgccgccagcgtgcagctggatgacaaacagcgcaccatcatcatgcaatggtttatgtatggcggcggcgtgctggggcttggcttgctgctcggtctggtactgccgcacctgatcccaagccgcaaacgcaaagatcgctggatgaactaaatcgccttcttcgttgcactgtcttattattaggaattgtgtatttgacgaagggatgatggcgtgaagatttatctggtcggtggtgctgttcgggatgcattgttagggctaccggtcaaagacagagattgggtagtggtcggcagtacgccacaggagatgctcgacgcgggctaccagcaggtaggccgcgattttcctgtgtttctgcatccgcaaacgcatgaagagtatgcgctggcacgtaccgaacggaaatccggctccggttacaccggttttacctgctatgccgcaccggatgtcacgctggaagatgatcttaagcgtcgcgatctgaccattaatgcgctggcccaggacgataacggcgagattatcgacccgtacaacggtctgggcgatctgcaaaatcgtctgttgcgccatgtttcccccgcttttggcgaagatccgttacgcgtactgcgcgtggcgcgttttgctgcgcgttatgcccacctcggttttcgtattgccgatgaaactctgacgctgatgcgcgagatgacccatgcgggtgaactggaacacctgacgcctgaacgggtatggaaagagacagaaaacgccctcaccacccgcaatccacaggtgttcttccaggtactgcgcgattgc

SEQ ID NO: 1496 - DNA, 2834 bp, Escherichia coli
  Strain O55:H7
  modified_base (1385)..(1385): a, c, g or t
  modified_base (1722)..(1722): a, c, g or t
  modified_base (2001)..(2001): a, c, g or t
tgcgcgttttattcccggaaattgacgccctgtttggtgttccggcccctgccaggtggcatccggaaatcgacacgggtattcataccttaatgacgctctcaatggcggcgatgctgagtccgcaggtcgatgtccgtttcgcaactttatgccacgatctcggtaaaggactgacgccgccagaactctggccgcgtcatcatggtcatggcccggcgggtgttaagttagtggaacaactatgccagcgtctgcgcgtgccaaatgaaattcgcgatttagccagactggtggctgagtttcacgatctcatccacaccttcccaatgctgaacccaaaaaccatcgtcaaattatttgattccatcgatgcctggcgtaaaccgcagcgtgtcgagcaactggcgctgaccagcgaggctgacgtgcgcggcagaaccggttttgaatcagcggactacccgcaaggccgctggttgcgcgaagcctgggaagtggcgcagtcagtgccgacaaaagccgtcgttgaagcgggatttaaaggtgtggagattcgcgaggagctgacccgacggcggattgcggcggtagccagctggaaggaacaacgttgcccaaagcctgagtgagtattgggcattttgccggatgcggcgtaaacgccttatccggctacatgtcaacgacagttgtaggcctgataagacgcgcaagcgtcgcatcaggcgttgattgccggacgcggcgtgaacgccttattcggcctacgcaatcgtggacaacgccaggcatccgacactattcctcaattaaaagaacacgacatacaccgcagccgccacaataaagcgataaatggcgaacgggataaacgaaatgcgcttaatcaattgcaggaaggttttaatcgctatcagcgccaccacaaaagcggtgataaacccaacggcaaacatcgggatatcgccgcttgtcaggaagccccagcttttgtagagatcgagcgccgttgcgcccatcatcatcggcaccgccagcaggaacgaaaactcggaagcagcgtaacggctcacccccatcagcatcccacctgaaatggtcgccccggaacgggagaaacccggccacagcgccagacactggaaacaaccaatcataaacgcctgacgataggtcatatcatcaagacccggcgcacgcggctctttcggcttcaggcattcggcggcaatcagcaacaaaccgccaacgaccagcgcatacatcacatttatcgggttaaacaatgacttaatcgtgtcgtggaacaacagccccagtaccaccgccggaatcatccccagcaaaatgtggatcagcgttaaacgacctttgctttctcnttcgtgctgcaacgggcggccaaagtggatgccaatcaggccaaacagacgccgccagaacatcactactaccgccagaattgatcctaactggatcacaacttcaaaggttttcgccgtgtcgccctcaaaccccaacaagtgaccgacaataatcatatggcccgtgctggataccggcagaaattctgtcaatccttcgaccacacccaatattgccgctatcagcagcgagtgcatatcgctcatcaataaacccctaaattataaaaatgtaacgcttgtccgaactactgcagtatgaccaggttataaccgtttggtttaacagctgtanaattaattattttctttcagattattgccacgctcaatgattacgccaacattcgccgcccgcgccactgcgcctggcttgctgagtttgatacgcacccacggcgagttgaagcgtgctaacagcagctctgccacctcttccgccacgcgctccaccagcgcaaaacgtgccccctcgacgtggctgaccaccgtttctgcaatgtcagcgtagctgaggcaatccgccacattatcgctttttgccgctttacggttatcccacgccatttcgatntcgaacactaatttctgttcgatggtctgttcccagtcgtaaacaccaatagtggtgattaccgaaagttgctctataaatacaatatccatcacgacctgctcgctttttggctaacccggataccacttccggcgaaatgtgcgtattatccacagattcatcgtttaacacgaattttcaaaacggaacagcttatgagtgcaatcgcgcctggaatgatcctcatcgcgtacctctgcggctccatttccagtgccattctggtttgccgcctgtgtgggctgcccgatccgcgaaccagcggctccggtaatcctggcgcaactaacgtgttacgtataggtggcaaaggagcagccgtagcagtactgattttcgacgttctgaaaggaatgttgcccgtctggggcgcgtatgaattaggtgtcagccccttctggctaggcttaattgccatcgccgcctgtcttggacacatctggcccgttttcttcggatttaaaggaggaaaaggcgttgctaccgcttttggtgccatcgcacccattggctgggatctcaccggagtaatggcgggaacctggttactgaccgtgctattgagcggatactcgtcgctgggagcgattgtcagtgcactgattgctccgttttatgtctggtggtttaagccacaattcaccttcccggtttcgatgctctcttgcctgatcctgctgcgtcatcatgacaacatccagcgtctgtggcgtcgtcaggagacaaaaatctggacgaaattcaaaagaaagcgcgaaaaggatcccgagtgatttctggtggttctacat

SEQ ID NO: 1497 - DNA, 490 bp, Escherichia coli
  Strain O55:H7
atagccttcatcgggtttgcccagccgttgctggcaccatgccgccagaaattccacgcagacacgtaatttcatgctgcgatagagcggctcccggtaaacagcccagatattggcgctttgtgcatactccggcaatacttgcaccagtttgccactctccagaaacggcaacacatcccactcggaacgcagcataatccctttgccctccagcgcccattgcagcacaatctcgccgctattggaggaaagatgcccgctaaccttcaccgattttttctcctgaccgttccccaactcccatattccgtgggtcatatcgcgctctttggtcaccagacagtcatgacgacttaattcctgtagggattgtggctgcggatatttttgcagatactcaggtgctgcgcataatattcttttatttttcgttaacagatgcgcaatataataatcaggaatttcgtcattaatacgaatatccaga

SEQ ID NO: 1498 - DNA, 16721 bp, Escherichia coli
  Strain O55:H7
  modified_base (3851)..(3854): a, c, g or t
  modified_base (6748)..(6748): a, c, g or t
  modified_base (6891)..(6891): a, c, g or t
  modified_base (9915)..(9915): a, c, g or t
  modified_base (10790)..(10790): a, c, g or t
  modified_base (10809)..(10809): a, c, g or t
  modified_base (10879)..(10880): a, c, g or t
  modified_base (10926)..(10927): a, c, g or t
  modified_base (14167)..(14168): a, c, g or t
  modified_base (14771)..(14771): a, c, g or t
  modified_base (16571)..(16571): a, c, g or t
  modified_base (16593)..(16596): a, c, g or t
ttatcctgcactaaatcaatttgccgatcgaacaattcaaaatacacctgtaactcaggataattgcgcataagttcggtaatggctggcgcaatatggctgcgcccaaaaccaaaactgcaaccaatacgaatcatcccctccgggcgcgttttgatttgcgtgacgtcatcgaccagtcgctgatattgggtgaggatttccagcgcatgttcgtaacaacgttggccactttcagtcagcgccacgccgcgagcggagcggttcagcagcgttgttgccagcgtattttcaaggatttggatccgcttggtgacaaatgcaggcgtttgcccaagcgtcgccgctgcagcactaaaactcccgctgtggacgatttctaccagtacctgcaagtctttggctaaaggccagctattcagcatcgttaattatccgcagttgtgataagcgcagtgtatttcgcaaaacattgccattccctgctctggcgcaatattcattcttattttcgcgttgattcacgaactgttaattacatattcacggtggcaaaaaatataaaaccacatttttagtggtagtttgtggcggtgaatttttccagacaaatacaaaaactggagttgccatgatgagcgaaagtaataagcaacaggcagtgaataagttgacggagattgtcgctaactttaccgccatgatttctacccgaatgcctgatgacgtggtggataaactaaaacagctaaaggatgccgaaacgtcgtcgatggggaaaattatctaccatacgatgttcgacaacatgcaaaaagcgattgacctgaatcgtcctgcctgtcaggacaccggggagattatgttcttcgttaaagtcggttcccgcttcccactgcttggcgagctgcaaagcatactcaaacaagccgtggaagaggcgaccatcaaagcgccgctgcgtcacaatgcggtagaaatttttgacgaagtaaacaccggcaaaaataccggtagcggcgtaccgtgggtcacctgggatatcgtccccgacggtgacgatgcggaaatcgaagtttacatggcaggcggcggctgcacgctaccaggccgctcgaaagtgttaatgccgtcagaaggctacgaaggcgtggtgaaattcgtcttcgaaaatatctccaccctcgcagtaaacgcctgtccaccggtactggtgggcgtgggcatcgccacctcggtggaaaccgccgccgtactctcgcgtaaagccattttgcgcccgattggcagccgccaccccaatccaaaagcggcagagctggagctacgcctggaagaaggactcaaccgtctggggattggtccacaagggctgactggcaacagttcagtgatgggcgtgcatatcgaatctgccgcccgccatccgtcaaccatcggcgttgctgtttctaccggttgctgggcgcatcgtcgcggcacactgctggttcatgccgatctcacctttgaaaatctgtctcacacccggagcgcgttatgaaaaagatcctgacaaccccgatcaaagctgaagatctgcaagatattcacgtcggcgatgtgatctatctgaccggtacgctggtgacctgccgtgacgtttgtcaccgccgattgatcgaactgaaacgtccgctcccttacgatctcaacggcaaagcgattttccacgctggccccatcgtgcgcaaaaacggcgacaaatgggagatggtctccgtcggtccgacaaccagtatgcgtatggaaagttttgaacgtgaatttatcgagcagaccggcgtgaaactggtggtcggcaaaggcggaatggggccgctgaccgaagaaggctgtcagaaattcaaggcgctacatgtaattttcccggcaggctgcgcggtgctggcggcaacccaggtggaagagattgaagaagtgcactggacagaactcgggatgccggagtcactgtgggtctgccgggtcaaagagttcggcccgctgattgtctctattgatacccacggcaacaacctgatagccgaaaacaaaaagctgttcgccgaacgccgcgatcccatcgtggaagagatctgcgagcacgtccattacatcaaataaccctcccggagaggctcgccccctctcctttttcgcaggcataacacgatgaaaccttccactgaatggtggcgataccttgcgccgctggcggtcatcgccattattgctctaattccggttcccgcagggctggagagtcatacctggctctactttgccgtttttactggcgtaatcgttggactgatcctcgaacccgtgccgggtgccgtggtggcgatggtgggtatctccatcatcgccatactctctccctggctgctgttcagcccggagcagctcgctcagccaggctttaaattcactgcaaaatccctctcgtgggccgtttccggtttttctaattcggttatctggctgattttcgccgcctttatgtttggcacaggctatgaaaaaaccgggctggggcgacgtatcgcgctgattctggtgaaaaagatggggcatcgcacgctgtttcttggctatgcggtgatgttctccgagctgatcctggcacctgtcacaccgtccaactcggcgcgtggtgcggggattatctatcccatcatccgtaacctgccgccgctctatcaatcacaaccaaacgacagcagttcgcgcagtattggctcgtacatcatgtggatggggattgttgccgactgcgtgaccagcgccattttcctgacggcgatggctcctaacttgctgttaattggactgatgaaaagcgcatctcacgccacgctgagttggggcgactggttcctcgggatgttgccgctcagtattttactggtcctgctggttccctggctggcttacgtgctgtacccgcctgtactgaagtcaggcgatcaggtgccgcgctgggcagagacggaactgcaggcaatgggcccgctctgttcgcgtgaaaaacggatgctggggctgatggtaggcgcgctggtgctgtggattttcggcggtgattatatcgatgccgcgatggtcggttacagcgtggtggcgctgatgctgcttctgcgcattatcagttgggacgatattgtcagtaataaagcggcgtggaacgttttcttctggctggcctcgcttatcaccctcgcgaccggactcaacaacaccggttttattagctggtttggcaaactgttagcaggcagcttaagcggttattcgccaacgatggtgatggtggcgttgattgtggtgttttatctactgcgctacttttttgccagcgccacggcgtatacctccgctctcgcaccgatgatgattgccgctgcgctggcgatgccggaaatcccgctgccggtgttctgcctgatggttggtgcggcaattggtctggggagcattcttacaccatacgccaccggccccagtccgatttactacggcagtggttatctgccaacggcggattactggcgactgggggcgatttttgggctgatattcctcgtattgctggtgattaccggcttactgtggatgcccgtggtgttgctttaagtaaggacggtgccggaagtaactctccggcacccgatagttttacgcagccggtaactccgccagcggccagcgcggacgcacgctaacgccgagatccgccgtcgcgcctgctttaaaccgcaccattccggcataggcgatcatcgcgccgttatcagtacaaaattccggacgcgcgtagaacacttcgnnnnggcgttttttcatcatttcagccagcttcgcccgtaacgtgcggttagaactcacgccgcccgccatgaccagtcgcttaaagcccgtctgatccagcgcacgcttacacttaatcatcaacgtatcgaccaccgcatcttcaaaggcgcgggcgatgtcagcacgcgtctggtcgtcggtgccgttgtcacgaatggtatttgccgcgaaggttttcaggccggagaagctgaaatccagccccggacggtcggtcatcggacgcgggaaaacaaagcgcccggcagtaccctgcgccgccattttcgacagtaacggtccgccaggataatccagccccagcagcttcgcggttttatcaaacgcttcaccggcggcatcatcgatagactcgccgagcagctcgtactgaccaatgccagtcacgctgattaactgcgtatgaccgccggaaaccagcagcgcaacaaacggaaattccggcgggttatcttccagcatcggcgctaacagatgcccttccatatggtgtacagggatcgccggaacgttccaggcaaacgccagagaacgccccacggtcgcgccaaccagcagtgcgccgactaatccagggcctgcggtataggccacagcatcaatgtcttttgccgttaaaccagactcctttagcgccgcctggatcaacggtacggttttacgcacatgatcgcgggaggccagttcaggcacaacgcccccgtagtcagcgtgcaatttcacctgactatacaattggttggctaacaaacctttttcatcgtcgtaaatggcgatgccggtttcatcgcaggaagtttcaatacccagtacacgcatgacttgttttacctcgctttattaccgcgcagtgtaggaccaatgcgggttgatgtaaaactttgttcgcccctggagaaagcctcgtgtatactcctcacccttataaaagtccctttcaaaaaaggccgcggtgctttacaaagcagcagcaattgcagtaaaattccgcaccattttgaaataagctggcgttgatgccagcggcaaaccgaattaatcaaaggtgagaggcacatgccggtaattaaagtacgtgaaaacgagccgttcgacgtagctctgcgtcgcttcaagcgttcctgcgaaaaagcaggtgttctggcggaagttcgtcgtcgtgagttctatgaaaaaccgactaccgaacgtaagcgcgctaaagcttctgcagtgaaacgtcacgcgaagaaactggctcgcgaaaacgcacgccgcactcgtctgtactaattccccgagagcgttgctctccgatcagaccgagttgtagttgtaaggccgtgcttccgaaaggaatgcgcggcttattttcgtttatgaattgctaaaaatcggggcctatggctggacgaatcccacgcgtattcattaatgatctgctggcacgcactgacatcgtcgatctgatcgatgcccgtgtgaagctgaaaaagcagggcaagaatttccacgcgtgttgtccattccacaacgagaaaaccccgtccttcaccgttaacggtgagaaacagttttaccactgctttggatgtggcgcgcacggcaacgcgatcgacttcctgatgaactacgacaagcttgagttcgtcgaaacggtcgaagagctggcggcaatgcacaatcttgaagtgccatttgaagcaggtagcggccccagccagatcgagcgccatcagcggcaaacgctttatcagttgatggacggtctgaatacgttttaccaacaatctttacaacaacctgttgccacgtctgcgcgccagtatctggaaaaacgcggattaagccacgaggttatcgctcgctttgcgattggttttgcgcctcccggctgggacaacgtcctgaagcggtttggcggcaatccagaaaatcgccagtcattgattgatgcggggatgttggtcactaacgatcagggacgcagttacgatcgtttccgcgagcgggtgatgttccccattcgcgataaacgcggtcgggtgattggttttggcgggcgtgtgctgggcaacgatacccccaaatacctgaactcgccggaaacagacattttccataaaggccgccagctttacggtctttatgaagcgcagcaggataacgctgaacccaatcgtctgcttgtggtcgaaggctatatggacgtggtggcgctggcgcaatacggcattaattacgccgttgcgtcgttaggtacgtcaaccaccgccgatcacatacaactgttgttccgcgcgaccaacaatgtcatttgctgttatgacggcgaccgtgcaggccgtgatgccgcatggcgagcgctggaaacggcgctgccttacatgacagacggccgtcagctacgctttatgtttttgcctgatggcgaagaccctgacacgctggtacgaaaagaaggtaaagaagcgtttgaagcgcggatggagcaggcgatgccgctttccgcatttctgtttaacagcctgatgccgcaagttgatctgagtacccctgacgggcgcgcacgtttgagtacgctggcactgccattgatatcgcaagtgccgggcgaaacgctgcgaatatatcttcgtcaggaattaggcaacaaattaggcatacttgatgacagccagcttgaacgattaatgccaaaagcggcagagagcggcgtttctcgccctgttccgcagctaaaacgcacgaccatgcgtatacttatagggttgctggtgcaaaatccagaattagcgacgttggtcccgccgcttgagaatctggatgaaaataagctccctggacttggcttattcagagaactggtcaacanttgtctctcccagccaggtctgaccaccgggcaacttttagagcactatcgtggtacaaataatgctgccacccttgaaaaactgtcgatgtgggacgatatagcagataagaatattgctgagcaaaccttcaccgactcantcaaccatatgtttgattcgctgcttgaactgcgccaggaagagttaatcgctcgtgagcgcacgcatggtttaagcaacgaagaacgcctggagctctggacattaaaccaggagctggcgaaaaagtgatttaacggcttaagtgccgaagagcgatcgggaagcccccgacagccgcactgagaggcagcggcaaatatataagtacgccctcgtaattatcgttggcggtaaacaaccgttggatttcagcgttaacggctgaaggacatcgggtcaatcgcccaacaccaacctcatgaaataagtgtggataccgtcttatggagcaaaacccgcagtcacagctgaaacttcttgtcacccgtggtaaggagcaaggctatctgacctatgccgaggtcaatgaccatctgccggaagatatcgtcgattcagatcagatcgaagacatcatccaaatgatcaacgacatgggcattcaggtgatggaagaagcaccggatgccgatgatctgatgctggctgaaaacaccgcggacgaagatgctgccgaagccgccgcgcaggtgctttccagcgtggaatctgaaatcgggcgcacgactgacccggtacgcatgtacatgcgtgaaatgggcaccgttgaactgttgacccgcgaaggcgaaattgacatcgctaagcgtattgaagacgggatcaaccaggttcaatgctccgttgctgaatatccggaagcgatcacctatctgctggaacagtacgatcgtgttgaagcagaagaagcgcgtctgtccgatctgatcaccggctttgttgacccgaacgcagaagaagatctggcacctaccgccactcacgtcggttctgagctttcccaggaagatctggacgatgacgaagatgaagacgaagaagatggcgatgacgacagcgccgatgatgacaacagcatcgacccggaactggctcgcgaaaaatttgcggaactgcgcgctcagtacgttgtaacgcgtgacaccatcaaagcgaaaggtcgcagtcacgctgccgctcaggaagagatcctgaaactgtctgaagtattcaaacagttccgcctggtgccgaagcagtttgactacctggtcaacagtatgcgcgtcatgatggaccgcgttcgtacgcaagaacgtctgatcatgaagctctgcgttgagcagtgcaaaatgccgaagaaaaacttcattactctgtttaccggcaacgaaaccagcgatacctggttcaacgcggcaattgcgatgaacaagccgtggtcggaaaaactgcacgatgtctctgaagaagtgcatcgcgccctgcagaaactgcagcagattgaagaagaaaccggcctgaccatcgagcaggttaaagatatcaaccgtcgtatgtccatcggtgaagcgaaagcccgccgtgcgaagaaagagatggttgaagcgaacttacgtctggttatttctatcgccaagaaatacaccaaccgtggcttgcagttccttgacctgattcaggaaggcaacatcggtctgatgaaagcggttgataaattcgaataccgccgtggttacaagttctccacctacgcaacctggtggatccgtcaggcgatcacccgctctatcgcggatcaggcgcgcaccatccgtattccggtgcatatgattgagactatcaacaaactcaaccgtatttctcgccagatgctgcaagagatgggccgtgaaccgacgccggaagaactggctgaacgtatgctgatgccggaagacaagatccgcaaagtgctgaagatcgccaaagagccaatctccatggaaacgccgatcggtgatgatgaagattcgcatctgggggatttcatcgaggataccaccctcgagctgccgctggattctgcgaccaccgaaagcctgcgtgcggcaacacacgacgtgctggctggcctgaccgcgcgtgaagcgaaagttctgcgtatgcgtttcggtatcgatatgaacaccgatcacacgctggaagaagtgggtaaacagttcgacgttacccgtgaacgtatccgtcagatcgaagcgaaggcgctgcgcaaactgcgtcacccgagccgttctgaagtgctgcgtagcttcctggacgattaatcggtaggccggatcaggcgttacgccgcacccggcacctgtccctttgcacaaacgccaccttttcggtggcgttttttatcgcccacgcaccaccagcgcctggtccagctcgcgatacgcttcaaccagtttctccagtgaaacgcgacttaaaccgctgggatttggcagcacccaaatctgcgtcgaaccaatgctgagcgtttgtttcccccacagtgcaccacgctggctgaatccctgttcatatgcttgtttgcccagaatcgccaacgcttgcggctgataatcttcaattttttcaatcagcttacgcccacctgcgtgtagctcttgctttgaaatttcattggcttgcaccgttggcctgtctaccagtttggtgacgccacaacgataatccagcagatgctgtgcctcctgcggcttcaactgacggtcggtaaacccggcctgatatatcaccttccagaagcgatttgccggatgagcaaagggaaaaccagtcccggcggatgaaagcccagggttgataccgcaaaacacgacccgtaaccctggagccaaaatatcctcaaccatatttactcctttctaacatcaccaggaaaagtataacggattgaaaatacattgtttataaaaacagcaggcgcgcggtaatggctggattgcgacacggagttactttataatccgctaccatggccccttagctcagtggttagagcaggcgactcataatcgcttggtcgctggttcaagtccagcaggggccaccagatatagcaaaggctgacgagaaatcgtcagcctttttctttttatatatcagttactttgcgtgccagtangccgctgcacgtacccgctgtgggtcatactgttccgcttcaaagcggcggcttaaattcttaacgactttaccttcgccggttatccagatgaagtaatcatcggcagggatttgcatctgcgccagacgcgcatctaccgcctgctcatcatgtgccagccattcgatattaaaaccatcaaggtgcgcgagataatcctgacaggcgttatcccgcacgctaaccagcgcactaacttgcggtttaacggcaagtttgctcaacgtttccaggcggcggcgcaatgcgggcattccggattcatcgcagacatacagctgatacgcgtaatcttccggcaccaccagcgaaccgcgcggacctgccaccgtaagtttatcgcccggttgcgcctgcatcgcccagccgctggcgaccccaccgtcgtgaataaagaaatcgatcgccagttcatggcgtagttcgtcatacagcggcgtatagtcacgcgacggtgggcgtggtccttccggccagacgatgccctcttccgttaccgttggcggcacaaagtgagcgtcaggttgaggaaagaagagtttgctgtgatcgtcaaagccgcgcgatgtaaaaccgtccagcgcctcgccgccaaggacaatgcgctgaaaaccggcgctgatacgctcaacgcgtagcacagtcaattcacggaagcgcagatcattgcgaacgcgctgcgggtagcggggggagttattcattgttatcgccttcgtgatggtaatcagatatatctaaataattttcgcaaatgataatgattgttaatcatgataaatgcaagcgatttgtagaactgatatgtctatagtctgacaagacgaaccgcntcttctcaggcatcattantcaacgccggatgcggcgtgaacgccttatccggcctacgtgtgagatgagtccacatttaaaaatcatnnttattcttgcaagagtgctcacatcagatataaattagatatatcnnattaagcaaaaggaggctgatatgagccatcatcacgaagggtgttgtaaacatgaaggccagccacgccatgagggctgctgcaaaggtgagaagtcagaacacgagcactgcggacacggtcaccagcatgaacacggtcaatgttgcggtggtcgccacggtcgcggcggcggtcgtcggcaacgtttctttggtcacggtgaattgcgtctggtgattctggatattctctcgcgcgatgacagccacggttacgaattgattaaagcgattgagaatctaacccaagggaattacaccccaagcccgggcgtcatctacccgacgctggattttctgcaggagcagtcgctgattaccatccgcgaagaggaaggtggtaagaagcagattgcgctgaccgaacaaggcgcgcagtggctggaagaaaaccgcgaacaggtggagatgattgaagaacgcatcaaagcgcgttgcgttggcgctgcgctgcgccagaacccgcaaatgaagcgggcgctagataattttaaagcggtgctggatttacgcgtcaaccagagtgatatcactgatgcacaaataaaaaagatcattgcggtgatcgaccgcgccgcttttgatattacgcaactggattaatcgccgcatccgccagtggcgcggtgcaattgccggatgcgacgcttgacgcaccttatccggcctacacccgctacacaccccgtaggcctgataagatgcgccagcatcgcatcaggcatcgtgtatcaaataccggatccggcataccgattaatgcagcaccgtcaccgcgtcttccagtcggctggcgcggtgtttcaccatcgccgacacctgcgcactctcttccaccagctcggcatttttctgggtgatgaggttaagctcatccactgcacgggtcaggctggaaagaccatcggcctgttccagcgttgaatggctaatctgggcaatcaactgggtgacgtttttcacctgtgccacaatatcttccatcgtacgtccggcggcgtgtacctgctgcgaaccggattgcaccttatcagcactggcatcaatcagcttgcgaatatcgttggcagcattggcgctgcggctggctaaatgacgcacttcccccgccaccaccgcaaaacctttgccctgttcgccggcacgcgccgcttccaccgccgcattcagggccagaatattggtctgaaacgcaatatcgttaatcagcgaagtaatggtgccaatgcgctgggtactgtcggcgatatcgtccattgtcttgatcaccgtggtcatcgcctccccgccctgcactgccgcattactggcggtgattgacagtttatcggcagccgacgccgtggcagagttctgtttcaccgacgccgccatttggttcatggtcgccaccgtttgctgaacgttatcaactgtctgctgggtatgttcgttcagttcatcggtgcctttcgccagcgtctcactgccgtttctgacactggacacctggcttgagacatcgttaattaaccaacggcacatcaggccaagctgccctaccgcgcgtaatgtcagccccagctcatcgctgcgattcagatgctcaacactattacgctctccggtcgccaccttcagtgcctgacgggcgacattttctatcgggcggacaatctgccattcaaaacaggcgcttgccaacaataccactaacgcacagaggatatacgtcaccaccggggcagcaacaaaccaaagcatggccgccagcaagataaacatcagggtcatcactccacgcgcccgccagcgaagcggtaatgaaggcagtttacccagccagcctttacgcaccaccaggcctttatgaatacgcttaccggtacgtccggcgttcagcgctttgtacagcggctccaccgccgcgatctcttcatccgtcgcccgggtacgaatcgacatatagccactgatttttccctcgcgcaccatcggtaccgcattggcccgcacccaataatggtcaccatttttgcggcgatttttcacgatgccgctccagggctccccttttttcagggtgaaccacatatccgcaaacgccgcttttggcatatccgggtgacgcaccatgttgtgcggctgcccttgtaactcttgcaaggtaaagccgctcacctgcacaaaagtgtcattagcatgagtgatatagctttgcagatcggtagtggacatcagagtggtatcgtccgccagcggggtattttgctgggtgacatacggatgagaagacatgttcgcgtcctgtgcaggttatatggttgttaacttcttgtcagagtttatgtcggccccgctgcggttatctttaaccgattaatttgatttagatcgcaatttgcgattaaagcacaaatctaattcgttgatttaaaatactttcactctgttactatacgaaaacgttaattatcttgcccaaaaatcaggcagttaatgccctgaaagcgtgcatttgcgcagcaattatcaaatccatacccgacaaaaaccgtgcaaaataacaacagatgttaacaaatagcattaaatattgcgcaaatgataaccacatttgtgtttatcccgattttcgcgatcgcagccggagtggcgcaatccctgcaatacttaaatcggtatcatgtgatacgcgagcctccggagcatattttgaacaggttaccttcgagcgcatcggctttagcgtgcagcgcccacgccctgaatctcattgaaaagcgaacgctggatcatgaggagatgaaagcacttaaccgagaggtcattgaatacttcaaagagcatgtcaatccggggtttttagagtatcgcaaatctgttaccgccggcggggattacggagccgtagagtggcaagcgggaggtttaaatacgcttgtcgacacccagggacaggagtttatcgactgcctgggaggttttggaattttcaacgtggggcaccgtaatccagttgtggtttccgccgtacagaatcaacttgcgaaacaaccactgcacagccaggagctactcgatccgttacgggctatgctggcgaaaacccttgctgcgctaacgccaggtaaactgaaatacagcttcttctgtaatagcggcaccgagtccgttgaagcggcgctgaagctggcgaaggcttatcagtcgccgcgnngcaaatttacttttattgccaccagcggcgcgttccacggtaaatcacttggcgcgctgtcggccacggcgaaatcgaccttccgcaaaccgtttatgccactgctgccagggttccgtcatgtgccgtttggcaatatcgaagccatgcgcacggctcttaatgagtgcaaaaaaaccggtgatgatgtggccgcggtgatcctcgaaccgattcagggcgaaggtggcgtaattctgccgccgccgggctatctcaccgccgtgcgtaagctgtgcgatgagttcggcgcactgatgatcctcgatgaagtacaaacgggcatggggcgcacgggcaagatgttcgcctgcgaacatgagaacgtacagccggacatcctgtgcctggcaaaagccctcggcggcggtgtgatgccgattggcgcaaccatcgccactgaagaggtgttctcagttctgttcgacaacccgttcctgcataccaccacctttggcggcaacccgctggcctgtgcggcggcgctggcgaccatcaatgtgttgctggagcagaacttaccggctcaggctgagcaaaaaggcgatatgttgctggacggtntccgtcaactggcgcgggaatatcccgatctggtacaggaagcgcgtggtaaagggatgttaatggcgattgagtttgttgataacgaaatcggctataactttgccagcgagatgttccgccagcgcgtactggtggccggaacgctcaataacgccaaaacgatccgcattgaaccgccactgacactgaccattgaacagtgtgaactcgtgatcaaagcggcgcgtaaggcgctggcggccatgcgagtaagtgtcgaagaagcgtagtatcaaatcggatggcaatacgacgtcgccatccgatctttttatacgatacgtacgcccgcaggcatcatccgctccggcgttaacagcacgctttcactgccgtcatcggtttccgcacacaacagcatgcattccgacgtttcaccacgcattttcgctttttgcagattgcataagaccaccaccgtttttcccatcaactcttcttcgctgtagtacggcaccaggctggtcacggtttgcagtgttttttcccccacatcaacctgtacgatgtacagcttgtcggcgttttcatggcgtttcacttccacaatctttccgacgcgcatttccagacgtgcaaaatcagcgtaagccacggtttccattgcttcctcccttcgagtaaaattttactaaactatagcaaaagtttttctcaatcctgtaggctaaaaatggagaatgcaggcgtgatcacattcgtgagccgctgtgttaccgttacagcgtcaaagaaacgcgctttatttactgaaaacaggtgacccgataagcacttcctctacaatgggggcgcacatcagggaaagtaaaaaaggtaaacatggcaacactaaaagacatcgcaatcgaagctggcgtatccctggcgacagtatccagggtcttaaatgacgatccgacattgaatgtgaaagaagagacgaaacatcgcattctcgagatcgccgaaaagctggagtacaagaccagtagcgcccgtaaactacagacaggcgcagtcaaccaacaccatattctggctatctacagctaccagcaggagctggagatcaacgatccttactatctggcgatccgccacggcattgaaactcagtgcgaaaagctggcgatcgaactgaccaactgttatgaacacagcggattaccagacattaaaaacgtcaccggtattttaattgtcggcaaacccacgcccgccctgcgcgccgctgccagcgcgttgaccgacaatatctgttttatcgactttcacgaacccggcagcggttacgatgcggtggatatcgatctggcacgcatcagtaaagaaatcatcgacttctatatcaaccagggcgttaatcgtattggttttattggcggtgaagatgagcctggcaaggcggatattcgtgaggtcgcctttgcggaatatggccgactgaaacaagtggtacgcgaagaggatatctggcgcggcggtttttccagttcgtcgggttatgaactggcaaaacaaatgctggcgcgggaagactatccgaaggcactgtttgttgcttccgattccattgctatcggcgtactgcgggcgattcatgaacgtggtctgaacatcccacaggatatttcgcttatcagcgttaacgatatccccaccgcgcgatttacctttccgccgctctccaccgtgcgcatccattccgaaatgatgggaagtcagggcgtaaacctggtgtatgaaaaagcccgcgatggtcgcgcgctgccgctnttagtcttcgttcccagcaaannnnaactgcgcggcacgacccgttaaatccccttacacactgtccggcaatcgtttttgccgggcagtgctgccgtttattttcgtgatccagttaaagtaaatgcatttacccgctactttttagta

SEQ ID NO: 1499 - DNA, 9406 bp, Escherichia coli
  Strain O55:H7
  modified_base (267)..(267): a, c, g or t
  modified_base (1888)..(1891): a, c, g or t
  modified_base (2778)..(2778): a, c, g or t
  modified_base (3325)..(3325): a, c, g or t
  modified_base (5116)..(5116): a, c, g or t
  modified_base (5143)..(5143): a, c, g or t
  modified_base (8704)..(8704): a, c, g or t
  modified_base (8731)..(8731): a, c, g or t
  modified_base (8768)..(8768): a, c, g or t
  modified_base (8794)..(8794): a, c, g or t
  modified_base (8804)..(8804): a, c, g or t
  modified_base (8857)..(8857): a, c, g or t
  modified_base (8878)..(8878): a, c, g or t
  modified_base (8887)..(8887): a, c, g or t
ttactaaactccccagcaattacacaaactaccatcaccatgaatggttccgatttctctctaccgggaggccctatgaatcgctgggaaaacattcagctcacccacgaaaaccgacttgcgccgcgtgcgtactttttttcatatgattctgttgcgcaagcgcgtacctttgcccgcgaaacgagcagcctgtttctgcccttaagcggtcagtggaatttccacttttttgaccatccgctgcaagtgccagaagccttcacntctgagttaatggctgactgggggcatattaccgtccccgccatgtggcaaatggaaggtcacggcaaactgcaatataccgacgaaggttttccgttccccatcgatgtgccgtttgttcccagcgataacccaaccggtgcctatcaacgtattttcaccctcagtgacggctggcagggtaaacagacgctgattaaatttgacggcgtcgaaacctattttgaagtctacgttaacggtcagtatgtgggtttcagcaagggcagtcgcctgaccgcagagtttgacatcagcgcgatggttaaaaccggcgacaacctgttgtgtgtgcgcgtgatgcagtgggcggactctacctacgtggaagaccaggatatgtggtggtcagcggggatcttccgcgatgtttatctggtcggaaaacacctaacgcatattaacgatttcactgtgcgtaccgactttgacgaagcctattgcgatgccacgctttcctgcgaagtggtgctggaaaatctcgccgcctcccctgtcgtcacgacgctggaatataccctgtttgatggcgaacgcgtggtgcacagcagcgccattgatcatttggcaattgaaaaactgaccagcgccagctttgcttttactgtcgaacagccgcagcaatggtcagcagaatccccttatctttaccatctggtcatgacgctgaaagacgccaacggcaacgttctggaagtggtgccacaacgcgttggcttccgtgatatcaaagtgcgcgacggtctgttctggatcaataaccgttatgtgatgctgcacggcgtcaaccgtcacgacaacgatcatcgcaaaggccgcgccgttggaatggatcgcgtcgagaaagatctccagttgatgaagcggcacaacatcaactccgtgcgtaccgctcactacccgaacgatccgcgtttttacgaactgtgtgatatctacggcctgtttgtgatggcggaaaccgacgtcgaatcgcacggctttgctaatgtcggcgatatcagccgtattaccgacgatccgcagtgggaaaaagtctacgtcgagcgcattgttcgccatattcacgcgcagaaaaaccatccgtcgatcatcatctggtcgctgggcaatgaatccggctatggctgtaacatccgcgcgatgtaccacgcagcgaaggcgctggatgacacgcgattggtgcattacgaagaagatcgcgatgctgaagtggtcgatattatttccaccatgtacacccgcgtgccgctgatgaatgagtttggtgaatacccgcatccgaagccgcgcatcatctgtgaatatgctcatgcgatggggaacggaccgggcgggctgacggagtaccagaacgtcttctataagcacgattgtattcagggacattatgtttgggagtggtgcgaccacgggatccaggcgcaggatgacaacggcaatgtctggtataaattcggcggcgactacggcgactatcccaacaactataacttctgtcttgatggtttgatctattccgatcagacgccgggaccaggcctgaaagagtacaaacaggttatcgcgccggtaaaaatcnnnncgctggatctgactcgcggcgagctgaaagtcgaaaataaactgtggtttaccacgctggatgactacaccctgcacgcagaggtgcgcgccgaaggtgaaacgctcgcgacgcaacagattaaactgcgcgacgttgcgccgaacagcgaagcccccttgcagatcacgctgccgcagctggacgcccgcgaagcgttcctcaacattacggtgaccaaagattcccgcacccgctacagcgaagccgggcattctatcgccacttatcagttcccgctgaaggaaaacaccgcgcagcctgtacctttcgcaccgaataacgcccgtccgctgacgctggaagacgatcgtttgagctgtactgttcgcggctacaactttgcgatcaccttctcaaaaacgagtggtaaaccgacatcctggcaggtaaatggcgaatcgctgctgacccgcgagccaaagatcaacttcttcaagccaatgatcgacaaccacaagcaggagtacgaagggttgtggcagccgaatcatttgcagatcatgcaggaacatctgcgcgactttgccgtagaacagagcgatggtgaagtgttgatcatcagccgcacggttatagcaccgccggtgtttgacttcgggatgcgctgtacctacatctggcgcatcgctgcagatggccaggttaacgtggcgctttccggcgagcgttacggcgactatccgcacatcattccgtgcatcggtttcaccatggggattaacggcgaatacgatcaggtggcgtattacggtcgtggaccgggcgaaaactacgccgacagccagcaggctaacatcatcgatatctggcgcagcaccgtcgatgccatgttcgagaactatccnttcccgcagaacaacggcaaccgtcagcatgtccgctggacggcactgactaaccgccacggcaacggtctgctggtggttccgcagcgcccaattaacttcagcgcctggcactatacccaggaaaacatccacgctgcccagcactgtaacgagctgcagcgcagtgatgacatcaccctgaatctcgaccaccagctgcttggcctcggctccaattcctggggcagcgaggtgctggactcctggcgcgtctggttccgtgacttcagctacggctttacgttgctgccggtttctggcggagaagctaccgcgcaaagcctggcgtcgtatgagttcggcgcagggttcttttccacaaatttgcacagcgagaataagcaatgaggatcatcgataacttagaacagttccgccagatttacgcctctggtaagaagtggcaacgctgcgttgaagcgattgaaaatatcgacaacattcagcctggcgtcgcccactccatcggtgactcattgacttaccgcgtggagacagactccgngaccgatgcgctatttaccgggcatcgacgctattttgaagtgcattactacctgcaagggcagcaaaaaattgaatatgcgccgaaagagacattacaggtcgtggaatattatcgtgatgaaactgaccgtgaatatttaaaaggctgcggagaaaccgttgaggtccacgaagggcaaatcgttatttgcgatatccatgaagcatatcggtttatctgcaataacgcggtcaaaaaagtagttctcaaagtcaccatcgaagatggttatttccataacaaataacaactacggcggcaaaaggagtttgccgccaccgctaccctactcattttcggagatgtgttatgtctgataccaaacgtaatacaatcggcaaattcggcttgctctcgctgacttttgccgccgtttacagctttaacaacgttatcaataataatattgagcttggactggcctcggcaccgatgtttttcctcgcgacgattttttattttattcccttctgtctgatcatcgcagaatttgtttcgttaaataaaaactcagaagccggtgtctacgcgtgggtaaaaagttcgctgggcggacgttgggcatttattactgcctatacctactggttcgtaaacctgttctttttcacctcgctgttgccgcgcgttattgcttatgcttcgtatgccttcctcggctatgaatatattatgacgccggttgccaccaccattatcagtatggtgctgttcgccttctccacctgggtttccaccaacggggcgaaaatgttggggccaattacctccgtcacttcaacgctgatgctgctgttaacgctctcctacattttactggcaggtacggcgctggttggcggcgtacagcctgctgaccccatcaccgttgacgcgatgatcccgaacttcaactgggcgttcctcggcgttaccacctggatctttatggccgcaggtggcgcggagtccgtcgctgtgtacgttaacgacgtcaaaggcggttcgaaatcgttcgttaaagtgatcatcctcgccgggatttttatcggtgtactatattccgtctcctcggtgctgattaacgtcttcgtcagcagcaaagagttgaaatttactggcggatcggtgcaggtattccacggcatggcggcgtattttggtctgccggaagcgttgatgaatcgctttgtcggtctggtgtcctttaccgcaatgttcggttccctgctgatgtggaccgcaacgccggtgaaaattttcttctccgaaatcccggaaggcatctttggtaagaaaaccgtcgaacttaacgaaaacggcgttccggcgcgcgcagcgtggatccagttcctgatcgtcatcccgctgatgattatcccgatgctcggttccaatactgtgcaggatctgatgaatactattattaatatgaccgccgcagcgtccatgcttccgccgttattcatcatgctggcttacctgaatttacgcgccaaattagatcacctgccacgcgatttccgtatgggctcccgccgcaccggtattatcgttgtttcaatgctgattgcgatatttgccgtagggtttgtcgcttcgacattcccgactggcgcgaatattctgaccatcattttttataacgtcggcggtattgttatattccttggctttgcgtggtggaaatacagtaaatatataaagggattaacggctgaagagcgccatattgaagcgacgccagccagcaatgttgattaaacagantaataaaaaatgagcaggcattttccntcttcctggatgaggagagggaaaatagtttctgcctttatatttttataattacaacgataaaaggctgtactttttctttagctcatggattaacacaatgaaattaatcactgcaccatgcagagcattacttgctctgccgttttgctacgccttttctgcggcaggagaagaagcacgtccggcagaacatgacgacacaaaaacacccgcaattacctcgacatcttctccttcatttcgtttttacggcgaattaggggttggtggatatatggatttagagggtgagaataaacataaatacagcgacggcacctatattgaaggtggcctggagatgaagtacggctcctggttcggcctgatttacggcgaaggctggaccgtgcaggccgaccacgacggcaatgcctgggtgcctgaccatagctggggcggtttcgaaggtgggattaaccgtttctatggcggttatcgaaccaatgatggcaccgaaatcatgctcagtctgcgtcaggattcctcgctggatgacctgcaatggtggggcgacttcacacccgatctgggctacgtcattcccaatacccgcgacattatgaccgcgctgaaggtgcagaacttaagcggcaactttcgttatagcgtcaccgccacacctgccggacatcatgacgaaagcaaagcatggctacattttggcaagtacgatcgctacgacgacaaatacacctatccggcaatgatgaacggttacatccagtatgaccttgccgaaggcatcacctggatgaatggtctggaaattaccgacggcacaggacaactctatctcacgggactgcttacccctaactttgccgctcgcgcctggcaccataccggacgtgccgacgggctggacgtaccgggaagtgaaagcgggatgatggtgagcgccatgtatgaagcgttaaagggcgtttatctctccaccgcttacacctacgccaaacatcgccctgaccacgctgacgatgaaaccacctctttcatgcagtttggtatctggtacgaatatggcggcggacgtttcgcaacggcttttgatagccgcttctacatgaaaaatgcctctaacgatcccagcgaccaaatcttcctgatgcaatatttctactggtaataaggactgtaatttcatgaaaatcaaaactattttaacgccagtaacctgcgctctgctgataagtttttccgcccatgccactaacgccgacaattataaaaacgtgattaaccgtactggtgcgccgcagtacatgaaggattacgattacgacgatcaccagcgttttaatccgtttttcgatctcggagcctggcatggtcatctgttgccagacggcccgaacaccatgggcggctttccgggcgttgcgctgctgacggaagaatacatcaactttatggccagcaatttcgaccgcctgaccgtctggcaggacggcaagaaagtcaacttcacgctggaggcatacaatattcccggcgcgctggtgcaaaaactgacagcaaaagatgtgcaggtcgaaatgactctgcgcttcgccacgccgcgcacgtcactactggaaactaaaatcatcagcaataaaccgctggatctggtgtgggatggcgaactgctggaaaaactggaagcgaaagaagggaaaccgctttccgataaaaccattgctggcgaataccctgactaccagcgcaaaatcagcgccacccgtgatggcctgaaagtcacctttggcaaagtgcgcgccacctgggatctgctgacctccggtgaatcagaatatcaggtgcataaatccctgccggtgcagactgaaatcaacggcaatcgctttaccagtaagtcgcatatcaacggttcgacgacgctctataccacctattcccatctgctgacctctcaggaagttagcaaagagcaaatgcagatccgcgatattctggcgcgtccggcgttttatctcaccgcctcgcagcaacgctgggaagagtatctgaagaaagggttaaccaatccggatgcgacgccggaacagacacgcgtcgcggtgaaagcgatcgaaacgctcaacggtaactggcgctcgcctgggggtgcggtgaaatataacaccgtcacgccgtcggtgaccgggcgctggttctccggcaatcagacctggccgtgggatacctggaagcaggcgtttgcgatggcgcatttcaatccggacatcgccaaagagaatatccgcgcggtcttctcctggcagatccagcctggcgacagcgtgcgtccgcaggatgtgggctttgtccccgacctgatagcgtggaatcttagccccgagcgtggtggcgatggtggcaactggaacgaacgaaataccaaacccagccttgccgcctggtcggtgatggaagtgtacaacgtcacccaggataaaacctgggtggcagagatgtacccgaaactggtggcctatcacgactggtggttacgtaaccgcgatcacaacggcaacggcgtgccggaatatggcgcgacccgcgacaaagcccacaacactgagagcggcgagatgctgtttacggtgaagaaaggcaacaaagaagagacgcagtctgggctgaacaactacgcccgcgtggtggagaaaggccagtacgacagtctggaaattccggcacaggttgctgcatcgtgggaatcggggcgtgatgatgccgccgtctttgggtttatcgacaaagaacagctggataaatatgtcgcaagcggcggcaaacgtagcgactggacggtgaaattcgccgaaaaccgcagtcaggacggaacgttgctggggtactcgctattgcaggagtcggtggatcaggccagctatatgtacagcgataaccattatctggcggagatggcgacgattctcggtaaaccggaagaggctaagcgctatcgccagttggcacagcagctcgcggactacatcaacacctgtatgttcgacccggctacgcagtacttctatgacgtgcgtattgaagataaaccgctggcgaacggctgcgcgggcaaaccgattgttgagcgcggtaaagggccggaaggctggtcgccgctgtttaacggtgcggcaacgcaggccaatgccgacgcggtggtgaaggtgatgctcgatcctaaagagttcaatacctttgttccgctgggaacggcggcgttaaccaatccggcctttggcgctgatatctactggcgcgggcgcgtatgggtggatcagttctggtttggtctgaaagggatggagcgttacggttatcgcgatgatgccctgaaactggcggatacgttcttccggcacgccaaagggttaaccgccgatggcccaattcaggaaaattacaacccgctgacaggcgcacagcaaggcgcaccaaatttctcctggagtgccgcacatttgtatatgttgtataacgattttttccgtaagcaataatttgcaacggctggcggatgcngcgtgaacgccttatccgccctacatnttcgttcccgtaggctggataagacgcgacaagcgtngcatccggcatctgcacctcgccacnggcggatgcngcgtgaacgccttatccgccctacatgttcgttcccgtaggctggataagacncgacaagcgtcgcatccggcntctgcaccncgccactggcggatgcggcgtgaacgccttatccgccctacatgtgcaatcccccaggtcggatagggcccggcaagcgtcgcatccggcgttaccaccgggcgtattctttttgaatcccatcacaaaccccgcactccccttttcccttttctccggcgacggctaaattagaactcatccgaccacataacaattattttacatactggacaattttatgagctacccgtcgctgttcgccccgctggatttaggttttaccacgttaaaaaaccgcgtgttgatgggttcaatgcacaccgggctggaggaatacccggacggtgctgaacggctggcagcgttttatgccgaacgcgcccgtcacggcgtggcgctgattgttagcggcggcattgcaccagatttaacaggcgttggcatggaaggcggcgcaatgctcaatgacgccagccagatcccacaccatcgcaccattaccgaagcggtacatcaggaaggcggcaaaatagccct

SEQ ID NO: 1500 - DNA, 3253 bp, Escherichia coli
  Strain O55:H7
  modified_base (413)..(415): a, c, g or t
  modified_base (803)..(803): a, c, g or t
  modified_base (1594)..(1595): a, c, g or t
  modified_base (1600)..(1600): a, c, g or t
  modified_base (1972)..(1972): a, c, g or t
ttgcataccgggcgctacagctaccaaccgcatctggtcgcaccgtccgcattgcaggcccccatcaaccgtttcgttcctcatgaactcacccatgaagagatcctgcaactgatcgacgatttcgcccgctgcgcgcaactggcacgggaggcaggatacgacggtgtagaggtaatgggttccgaagggtatttgatcaacgaatttctgacgctgcgcaccaatcagcgcagtgaccagtggggcggcgattaccacaaccggatgcggtttgccgttgaagtggtgagtgcggtacgcgaacgcgttggcaacgacttcattattatctaccgactgtcgatgctcgacctggtcgaaggcggcgggacttttgccgaaacggtagagctggcgcaggccattgaagnnncgggcgcgaccattatcaacaccggcattggctggcatgaagcgcgtattccgaccatcgccacgcccgtgccacgcggcgcatttagctgggtcacgcgcaaactgaaaggtcacgtctcgctgccgctggtgaccaccaaccggattaacgatccgcaggttgccgacgatattctctcgcgcggcgatgccgatatggtatcgatggcgcgaccgtttcttgcggatgcggaactgctgtcaaaagcgcaatcagggcgagccgatgagatcaacacctgcattggctgcaaccaggcgtgtctcgatcagatcttcgttggcaaggtcacctcgtgtctggtgaatcctcgcgcctgccatgaaaccaaaatgccgatccttcncgccatgcagaaaaaaaatctggcggtggtcggtgcgggacctgctgggctggcgtttgccattaacgcggcggcgcgtggtcatcaggtaacgttgtttgacgcgcacagtgagatcggcgggcagtttaatatcgccaaacagatccccggcaaagaggagttttacgaaacgctgcgctattaccgccggatgatcgaagtgacgggcgtgacgctaaaactcaatcacaccgtgacggcggatcagttacaggcgttcgatgaaacgatcctcgccagtgggatcgtgccgcgcactccgcccatcgacgggatcgatcatccgaaggtattgagttatctcgatgtactgcgcgacaaagcgccggtgggcaacaaagttgccatcatcggttgtggcgggattggttttgatacggcgatgtatttaagtcagccgggcgaatccaccagccagaatatcgccgggttctgtaatgaatgggggatcgacagcagcctacaacaggctggtggcttaagcccgcagggaatgcagatcccgcgtagcccacggcagattgtgatgctccagcgcaaagccagcaaaccgggacaggggttaggcaaaaccaccggctggatccatcgcaccaccctgctctcgcggggtgtgaaaatgatcccaggcgtaagttatcagaagattgacgatgacgggctgcatgtggtgatcaacggcgaaacgcaggtattagcagtggacaatgtggtgatctgcgcagggcaagagccaaaccgcgcattgnngcagncgctgattgatagcgggaaaacggtgcatttaattggcggctgcgatgtggctatggagctggacgcacgacgggcaattgcccagggaacacggctggcgctggagatttaaatcgtgcattgaagtgccggatgcaacgcatccggcacgtcgcgttaatcaataaacaaggcgggagaaatgccgaatcgcgttgccaattttttagcgtgttccagcgttaatttcctcttcccgctcaaaacgcgtgacaccatagatttactgccaatttccggcagatcggaaagggttaaaccatattgatccataagggtacgaatcacggctataccgccaggcatggcttgagccatggcattaaattccncaaattcgggcgctgattcttcccacgcggttattttggcacacaccagatccagtaaggggttttcaggatcgttgagcagcagatgatctaccagttccagcgcctggatgtattgttcctcgttctgaatacccgccagaaaaggtgccacagcagttagcttttctcctgcatgcaagatgtcggcaatcgcaatcattttttccccttagtacgatgaacagcggtaaaaaaatcgtattctttatgcgtcataacttcacgtatgtagcacttttgcgattcaaaaaagaccattgctacaacacgtaattcattgcccccaacattgaaaacataatgcttatccagatatttgaagttatccagagatgggaatactgcttttaatgactcaggttttttgaaatatcccttagcaatcgtgttccctagagccaccaactccgttttatgttgcgggtatttttccgcagcatctttcaatgctttttgagttatcaggtgcattcttcatcacgtccgttgacaaattggcaatatgataacatccgttgacagattggcaacggatgaatttatctgtgtgacggaagaataaacgttaaacaacgctaaacaagagaatgtagaggatggtgacagggattttttgttttatggagcgcgattccagaactgggcagacattgccggatgcgacgcttgccgcatcttatccgacctgggggtaatgtgctaaacgtatgccagataaggcgtttacgccttatctggcaggtagctgtcaatcttaccgacgacgccccagcttcactgctttcagcaccacaaatttattattcgtggcgatggtggtgcagttgccaaaaattttcttcagtttatggaagtaatccaggtgacggttggcaacgatatacagctcgccgttgattttcaggcagcggcgggcgtggtggaacatctcccaggcgacgttatcggtcagcgcatgttgctgatgaaacggcgggttgcagagcacagcattaaagcggaaaggctccacgccggagagcgcgttgttgatcataaattcgcagcgatccaacgcctctggcatgttggtttcaacgttcaaacggctggaagcaaccgccatcggcgattcatcgacaaacaccactttcgcctgcgggtttttatcaagcagcgtcagaccaataacgccattaccgcaaccgagatcgacaatctccccttcgagattctctggcagatgttgcataaagaagc

SEQ ID NO: 1501 - DNA, 18074 bp, Escherichia coli
  Strain O55:H7
  modified_base (262)..(262): a, c, g or t
  modified_base (487)..(487): a, c, g or t
  modified_base (2694)..(2694): a, c, g or t
  modified_base (8321)..(8321): a, c, g or t
  modified_base (9089)..(9089): a, c, g or t
  modified_base (9459)..(9459): a, c, g or t
  modified_base (9462)..(9462): a, c, g or t
  modified_base (9627)..(9627): a, c, g or t
  modified_base (10452)..(10452): a, c, g or t
  modified_base (11258)..(11258): a, c, g or t
  modified_base (11334)..(11336): a, c, g or t
  modified_base (14828)..(14828): a, c, g or t
  modified_base (15275)..(15275): a, c, g or t
  modified_base (16157)..(16157): a, c, g or t
  modified_base (17559)..(17562): a, c, g or t
cgatatccagcccggtgcgggagaagacattcgcatggttgtggatagtccagtcagtaccttccagcttccagctaacggtctgcggcgcatcggccagcggtggttcattgaaagtgcagttaatcaggcgcgctttcttccatgccagcgtggtggtggtcgggccgagcactttttcgaatagttccagcgtggaagtgtggatgtcacgggctttggcaccggcaataatacgtgtttgtggcgtgaccactttgcncagcgcacgcagttgctgttccagcaatgccagtgttttcggcactttgatcagcaccacacccggctgttgcgggtagtcggcggtgctgtcgagaaacttcacgctcgactcatcaatcccgttgaggcgtaaattctcgcgcgtcgccagttcactgatgtatgagtcgccaatgctgtacggcttatgttccgccagcgcgcagcttaacgcaccaaaggnatcattcaggatcaacaccgggccgcggatttctgtgttgtccaactgttgcagcaaatattcatccgccgcttcccacgcctgtagcgggttaacgtcatccgtcgccggaaaacgttgtagtgtcagtgaacggaaaccgttgtctaagtggctcatcggccctcctgaatgataaaatttcgacattgcccctgaaaagggtgcgtgagtataccctttttctctttttcgtgggcggttatgagcaatcttacttatcttcagggttatcccgagcagctactttcccaggtgcgaacactgattaacgaacagcgtctgggcgatgtgctggcaaaacgctatccgggaacacacgactacgccaccgataaagccctctggcaatatactcaggatctgaaaaatcagtttctgcgtaatgccccgccgatcaataaagtgatgtatgacaataagatccatgtgctaaaaaacgcgctcgggttacataccgctgtttctcgtgtgcagggcggcaagctgaaagcaaaagcagagatccgcgtcgctaccgtgtttcgcaacgcgccggaaccgtttttgcgcatgatcgtggtgcacgagctggcgcacctgaaggagaaagagcataacaaagcgttttaccagttgtgctgtcatatggaaccccagtaccaccagcttgagttcgacacccgactgtggctaacccagttgtcgcttgggcaggacaaaatctgaaaatgatgtcaggcgttatcttttctttctttagcgcctaaaatcgacctcccccctttcgttaaggataacgaccatgctgcgcgcatttgcccgccttcttctccgtatttgtttttctcgccggactctaaagattgcctgcttactgttacttgtggcaggagcgaccatttttatcgccgatcgcgtaatggtcaacgccagcaaacagctgacctggagcgacgtcaacgtcgttccggcgcgtaacgtgggcttattgctgggggccaggccgggtaatcgctactttacccgacgtattgataccgcagcagagttgtaccacgccggaaaagtgaaatggctgctggtcagtggcgataacggacgtaaaaattacgatgaagcgtcaggcatgcagcaggctttgatcgcaaagggcgtaccggcaaaagtgatcttctgtgactatgccggattctcaacgcttgattcagtggtgcgtgccaataaagtgtttggggagaaccatatcaccattatctcgcaggaatttcataaccaacgcgccatctggctggcaaaacaatacggcatcgatgctatcgggtttaacgcaccagacctggaaaaaggacgcggaaagattgtccgtctgcgagagaaactcgccagagtcagcgcggtgattgacgcgaaaatcttccatcgtcagccaaaatatctcgggccgtcggtcattattggtccgtttagtgagcatggttgtccggcgcagaaataatgcgtatccgcgcacgtcgaagatgaaaaaggcgtgctacattgacgacagaatccctttattgagtatccacgcgttatgatacgtttcgccgtgattggtacgaactggataactcgccagttcgtggaggccgcacatgaaagcggtaaatataagttaaccgccgtttattcccgcagccttgaacaggcccagcacttcgccaatgagttttctgtcgagcatctgtttacttcgctggaagcaatggcggaaagtgacgctatcgacgcggtgtatattgccagcccgaacgccctgcatttttcccagacgcaacttttcctgagccacaaaattcatgtgatttgtgagaaaccactggcgtcgaatctggcggaagtggatgcagccattgcctgcgcgcgtgaaaatcaggtggtgctgtttgaggcatttaaaacggccagcctgcctaactttcatctgttacgccaggcgctgccgaaagtcggcaaactgcggaaagtttttttcaactattgccagtattcctcgcggtatcaacgttacctggacggtgagaatcccaacacctttaatccggcattctctaacggttcaattatggatatcggcttttactgcctggcgtcggcggtagcgttatttggtgagccgaaaagcgtgcaggcaaccgccagtttantggcaagtggtgtagatgcccacggcgtggtggtgatggattacggtgatttcagcgtcaccttgcagcactcaaaggtcagcgattctgtcctggcaagcgagattcagggcgaagcgggatcgctggtgattgaaaaactgtctgaatgccagaaagtgtgcttcgtgccgcgtggcagccagatgcaggatctcacccagccgcagcatattaataccatgctctacgaagcagagctgttcgctaccctggtggatgagcatctggtggatcatccagggctggcggtcagtcgcatcacagccaaactgctgaccgagatccgccgccagactggggtgatttttccggcagatagcgtaaaactataattgccaaagtaaaacagtgtaaaaggtatgtaacagaccattgactgactgaatggtctgtcatactttgttacctgcaaaggggagtaacttcattgccggtcgatcgtcattacgatgtgtgaaaaaccacatccggtcaccgggcaacccgaaaggaatacgcagacgtattccttttttgttgtaagtgagaccttgccggaaggcgaggtctatgcataaaaagcagcggctgacgtcttccgacgttggccgttttttttatgtgtaaggaacttctatgaatactgtcggcacgccgttgctatggggcggattcgctgttgttgtcgccattatgctggctatcgacctgttgttgcagggacgtcgtggggcacatgccatgaccatgaaacaggctgcggcctggtcgctggtctgggtgacgctgtcgttactgtttaacgctgctttctggtggtatctggtacaaaccgaaggtcgcgccgttgccgatccacaggcgctggccttcctcacgggttatctgattgagaagtcgctggcggtcgataacgtctttgtctggctgatgttgttcagctatttctccgttccggcggcattacaacgccgcgtgctggtgtatggcgtgctcggggcgattgttctgcgtaccatcatgatcttcactggcagctggctgatttcgcagttcgactggatcctgtatatcttcggtgccttcctgctgtttaccggcgtgaagatggcgctcgcccatgaagatgaatcaggcattggcgacaagccgctggtgcgctggctacgcggtcatttgcgcatgaccgacaccatcgacaacgagcatttctttgtgcgtaagaatggattgctgtacgccacaccgctgatgctggtactgattctggtggaattgagcgacgtgatttttgccgtggatagcattccggctatcttcgccgtgaccactgacccgttcattgtgctgacctcaaacctgtttgcgatcctcggcctgcgtgcgatgtatttcctgctggcgggcgtagcagagcgtttctcgatgctcaaatatggcctggcggtgattctggtgtttatcggtatcaagatgctgattgtcgacttctaccatattccaatcgccgtctcgctgggcgtggtgtttggcatcctggtgatgacgtttattatcaacgcctgggtgaattatcggcatgataagcagcgggttggatgatttttaatctgcctaagccgtgtaccctgtcatcaacatgagcaccgttttctccctctcccttccagggagagggtcggggtgagggtaatttttcgcaccgatgctggcctgttcccctcaccctaaccctctccccaaacggggcgaggggactgaccgagtccttttttgacgtagtcctcagtctggaagccgcacgttggctttatttttatgtcaaataaatgtaaccattaagttgcaaaatatgacctctctttaaaatccagcatttttcgcttcccgaagctgtaactttccttatactcgaccttgcaaacactttgttacatcctgaaagatgcgtcgacagaacgcaccagggatgtgcgacaacacaatgaaaggatcgaaaaatgactacgcaacgttcaccggggctattccggcgtctggctcatggcagcctggtaaaacaaatcctggtcggccttgttctggggattcttctggcatggatctcaaaacccgcggcggaagctgttggtctgttaggtactttgttcgtcggcgcactgaaagccgttgcccccatcctggtgttgatgctggtgatggcatctattgctaaccaccagcacgggcagaaaaccaatatccgccctattttgttcctctatctgctgggtaccttctctgctgctctggccgcagtcgttttcagcttcgccttcccttctaccctgcacttatccagtagcgcgggtgatatttcgccaccgtcaggcattgtagaagtgatgcgcgggctggtaatgagcatggtttccaaccccatcgacgcgctgctgaaaggtaactacatcgggatcctggtgtgggcaattggcctcggtttcgcactgcgtcacggtaacgagaccaccaaaaacctggtcaacgatatgtcgaatgccgtcacctttatggtgaaactggtcattcgcttcgcaccgattggtatttttggtctggtttcttctaccctggcaaccaccggtttctccacactgtggggctacgcgcaactgctggtcgtgctggttggctgtatgttactggtggcgctggtggttaacccattgctggtgtggtggaaaattcgtcgtaacccgttcccgctggtgctgctgtgcctgcgcgaaagcggcgtgtatgccttcttcacccgcagctctgcggcgaacattccggtgaatatggcactgtgtgaaaagctgaatctggatcgcgatacctattccgtttctattccgctgggagccaccatcaatatggcgggcgcagcaatcaccattaccgtgttgacgctggctgcggttaatacgctgggtattccggtcgatctgcccacagcgctgctgttgagcgtagtggcttctctgtgtgcctgtggcgcatccggcgtggcggggggttctttgctgctgatcccactggcctgtaatatgttcggtatttcgaacgatatcgccatgcaggtggttgccgtcggctttattatcggcgtattgcaggactcttgcgaaaccgcgctgaactcttcaactgacgtgctgttcactgcggcagcttgccaggcggaagacgatcgtctggcaaatagcgccctgcgtaattaattgtttaacccctttcgtctatggcgggaggggttttctctactttaaacggatcaattccccttttctgcatccgccagaaacgaatgatattcaggccattcataagcagaaaactaccctcaatcatcgtgccgcctatcgaccccgcccagaagttgtgaatcacccagcaacacgttgaaaaccacatcacgcagcgcatggtgagccctttacagcggaacagcgcccaggtactgacaatcgtaccgataaccggcaatagttcgacaggatgatggaacttcgcgaggccaattccgccagtcagcacaataaaaatcgccattacccataagctgcgcgtgcgtaaggtaatcaatgtacgaatggcattaaggatggcactggcaccagcgggataggtgcccagaagaaaaaaatgtacgccaataacggcgctatagaccgaaagctgctttttgaagcgacgttcgtcacgattgaaaaatgttgtgataccaatcagaaaggcgatgacacccacgccctgggccagccaatacgcggtcatgataaatccttatcaggtatggaaaagcaaacggcgcttcacattatgaaacgccgttttttattaacaactcatttcgactttatagcgttacgccgcttttgaagatcgccagttcgcggaagtcgttacgctcgttgcaggtttgtttaccgttggcaaactcaacgatggtgtcgataaattcttccagcaactgcggcatcgctttaccgtggatcagctgacccgcgtcaaagtcgatccagtgttttttcttcgccgccagttcactgttggtagcgattttcaccgtcggtacaaagccgccgtatggcgtgccacgaccagtactgaacagcaccatatggcagcccgcacccgccagggcgctggtcgctacggcatcgttacccggcgcacttaacaagttcagccccggcgttttcagacgctcgccgtaacgcagcacgtcaaccacgacgctggaacccgctttctgggtacagccaagggatttatcttccagcgtggtgataccgcccgctttgttccccggcgatgggttttcatagatcggctggtcatgggcaataaagtactgtttgaagtcgttgaccatggtgaccagtttttcaaacgttgcttcgtcgcggcaatggtccatcagcaactgctctgcgccaaacatctccggcacttcggtcagtacggtagtaccgccgttagcaatcacgtagtcagagaaacgccccagcatcgggttagcagtaataccagaaagaccgtcagaaccaccgcactccagaccaaacttcagttcgctgagtttgcctggctcgcgtttatcgttgcgcatcacgttatacagctgatgcaaatgctcgattccggcttcgatctcatcatcctgctgttggcagatcatgaaatgaacgcgttcaggatcgatatcgcccagcgtttcacggaatgcggcaacctggttgttttcacagcccagaccaatcaccagcactgcgcctgcgttcgggtggcgcaccatgttttgcagcatggtgcgggtattaatgtgatcgtcgcccagctgtgagcagccgtaggtgtggctgaagaggaacacgccgtcggtaccttcagcgttgttggtctctttcagaaaacggttctggatctgccgcgcgatgccgttgacacagcccacggttggcaggatccacagctcgttacgcaccccgacatcgccgttagcgcgacgatagatctgcacttcacgatctgccgcttgcgcaggcagatcctgaaaatcaggttgatagcgatactgatccagatcgctcagattcgtgcgcgtattgtgggcgtgaacgtgttcccccgccgcaatatccgccaatgcataaccaatcggcaggccatatttgatgacgttggccccttttgcgatattcgttaacgcaaatttatgtccacgagcaacatcctggcgcagcctaacagtttggttatcgacactgacttctgtgccttcagccaaatccgctaaagcgaccgcgacgttatccagcgcatggatcttgatgtattgcatatcaaccccagaccttagttcagttcaatggcgaagtagtcacgcgcattgttaaagcaaatatttttcaccatctcgcccagcaggttgatgtccgccggtgcttcgcccgcttccacccagcgaccgatcatctggcacagaatgcggcggaagtattcgtgacgggtgtatgacaggaagctacggctgtcagtcagcataccgacaaagcggctcagcaaaccgagctgcnccagttgggtcatctgacgttccataccgtctttctgatcgttaaaccaccagccggaaccgaactgcattttgcccggcataccttcgccctggaagttaccgatcatggtgcccagcacttcgttatcgcgcgggttcaggcagtacagaatggttttcggcagcaggttttcttcgttctgcttgctcagcagcttagacaactcttctgccatcggacggtcgttgatggagtcaaagcctacatccggccccagcagtttgaactgacgcaggttgttattacgcagcgcgccaatgtggtactgctgtacccagccgcgacgtgcatattcggcaccaaggaacaccagtaccgcagttttgaactgtgccacttcgtgctcgctcagggtttcgccagccagacggcgcgccagaatgctgtccagttccgcttcgttcgcttcagcaaacatcaccacgtccagcgcatggtcagacactttacagccgtgagcggcgaagtgatccagacgtttggtcaaggcagtttgcaggtcagcaaagcggcgaatgtcggtatcggaaacttcgcccagcttcgccatgtagtcgttaaaggtcgcctgttcgatgttgaaggctttgtccggacgccagctcggcagcactttgatggtgaaagagccgtctttggcgatctctgcgtgatgctccagagaatcgatcgggtcatcggtggtgccgaccattttcacgttcatctgctgcatgatgccgcgcncggagaagttatcctgcgccagcagttcgttacattcgttccagatttcatcggcagttgacggagaaagcaatttgccagtgataccaaacggacgacgcagttcgaggtgcgtccagtggtataacgggttgccgatagtgtgcggaacagtcgccrcccaggcgtcaaatttttcacggtcagacgcatcaccggtacacagacgctcggccacaccgttggtacgcatagcgcgccatttgtagtgatcgcctttcagccagatgtcatacaggtttttaaaacgatagtcttccgcaatctgctgcggcggcaaatggcaatggtaatcgaaaatcggctggtcttttgcgtagtcgtgatacanacngcgggcaaattcggtatctaacaggaaatcttcagtcataaacggagtcattttcgtcttcctctcaacgagtgagctagcttgcttatggtgcgatgctgacaaagttatcacaccaatttccagagtccgaagatattttcgtgagttagatcaataaacgtngttaaaaaaattactctcaaagtggtaaatctctctgcaggccgcgccagtactggcctcgctgtcgtcaggtaatgtcccctacaaatattcgcacatttgtgatggctctcaccttttaaagttgtatgacaagttatctttctgccgtcgcaaatcataagtcgacggaatgcaaattgccgattcattcatttgttagatgaatcgggttaaccggtacggaagccgaattagcacgaaactttcatggcaacgttcggggcgtgccggttttttttcggttacccggtcgtaactaacatcttcagcctctggcgggatgatggccgcgcttcctgcggatataacaaaacgatgaggttttacatgcgtaaaattaaagggttacgttggtatatgatcgcactggtgacgctcggcaccgtgcttggttacctgacgcgtaacactgtggcggcagctgcgccaactctgatggaagagttaaacatctccacccaacagtattcctatatcatcgcagcctattctgctgcttatacggtcatgcaaccggtagcaggttatgtactggatgtgctgggtacgaaaatcggttatgcaatgtttgctgtgctgtgggccgtgttctgtggtgcaaccgcgctggcaggtagctggggtggcctggctgttgctcgtggtgcggtcggtgccgcggaagcagcgatgatcccggcgggtctgaaagccagctccgaatggttcccggcgaaagagcgttccatcgcagtaggctattttaacgtaggttcttcgattggtgcgatgattgcgccgccnctggtggtatgggcaatcgtgatgcacagctggcagatggcatttatcatctccggtgcattgagctttatctgggcgatggcatggctgattttctataaacatccgcgcgaccagaagcatctgaccgatgaagaacgcgactatattattaatggtcaggaagcccagcaccaggtgagtacggcgaagaaaatgtccgttggtcagatcctgcgtaaccgtcagttctggggtatcgcgctgccgcgtttcctggcagaaccggcctggggtacttttaacgcgtggatcccgctgttcatgtttaaagtttacggctttaacctgaaagagatcgcgatgttcgcctggatgccgatgctgtttgctgacctcggttgtatcctcggtggttacctgccgccgctgttccagcgttggtttggtgtgaacctgatcgtttcccgtaagatggtcgtaacgctgggtgcagtgctgatgattggcccgggtatgatcggcctgttcaccaacccgtatgtcgcaattatgctgctgtgtatcggtggttttgcccaccaggcactgtctggcgcgctgattacgctctcttccgacgtgtttggtcgtaacgaagtggcaacggcgaacggtttaaccgggatgtccgcatggctggcaagtacgctgtttgcgctggttgtcggtgcactggctgacaccatcggcttcagcccgctgttcgcagttctggcagtatttgacctgctgggtgcgctggttatctggaccgtattgcagaacaaaccggcgattgaggtggngcaggaaacacataacgatcccgcaccgcaacattaacgcttcgtgtaagttttagtttcgcttcaaagccgcctnnncaggcggctttttcatcactgcgagtagagctaaactcgcaaaagtggtataacaaatatagtctgccgtatcatgcctggagcgcatatggaaatcactgaaccacgccgtttgtatcaacaacttgccgctgacctgaaagagcgcatcgaacagggcgtctatctggtgggtgataaactgcctgctgagcgctttattgccgatgaaaagaacgtcagccgtacggtagttcgtgaagccatcatcatgctggaagttgaaggctatgtcgaagtgcgtaaaggttcaggtattcacgtggtttccaaccagccgcgccatcagcaggctgcggacaataatatggaattcgccaattacggtccgtttgagttactccaggctcgccaactcatcgaaagtaatattgccgagttcgcagcaactcaggtaacgaaacaggacatcatgaaattgatggccatccaggagcaggcgcgcggcgaacaatgcttccgtgattccgagtgggatttgcagttccatattcaggtagccctggcgacgcagaactccgccctggcggctatcgttgaaaaaatgtggacccagcgtagccataacccgtactggaaaaaactgcacgaacacattgattcccgtaccgtcgataactggtgtgatgaccacgatcaaatcctcaaggcgctgattcgcaaagatcctcatgctgctaagctggcaatgtggcagcacctggaaaacaccaagatcatgttattcaacgaaaccagcgacgacttcgagttcaatgccgaccgctatctgttcgccgaaaacccggtagtgcatctcgatacggccaccagtggcagtaaatgaaatacctgtccgacaggcgctgcgacgcgcctgtttgtctcgtcggtaagcgaaaagtataaagtgtcagcctgtgtaaatcctctcgccaccctcccctgcattcagcaaaatcagactccacggacatgtaattttgataacgaacaacgttgacctttgttacaattagattcaatttgaatttatgtttttgaatgctttcttatctcacgatttaacagggaatagttcaggctgtgttgatgtatcaaacccgcagaacataccaaaacagcaataacattgcggtagtgcatcttttaaaaccagcgtggcgttaaccgattcaccaggaataatgaatggaacttttgacccaattgctgcaagccctgtgggcgcaggattttgaaaccctggccaatccatcgatgattggcatgttgtattttgtcttgtttgtaattttgttccttgaaaacggcttgcttccggcggcctttttaccgggcgacagtttactggtattggtcggcgtgttgattgcgaaaggcgcgatgggctatccgcaaacgattctgctgctgaccgttgccgccagcctcggctgctgggtcagctatattcaggggcgatggctgggcaatacccgcaccgtacaaaactggctatctcatttacccgcgcattatcatcaacgcgcacaccatctttttcataaacacggtttatcggcgctgttaattggtcgctttattgcgtttgtcagaacactgctgccgacgattgccgggttatcagggctgaataacgcgcgctttcagtttttcaactggatgagcggtctgctgtgggtattgatcctgacaactctgggttacatgctcggcaaaacgccggtatttttaaagtacgaggaccagctgatgtcatgcctgatgctgctcccggtggtgctgctggtgtttggcctggcaggttctctggtcgtattatggaaaaagaaatatggaaatcgggggtaagggatgcaaatacctcgcatgtcgcttcgccagctagcctggtccggcgctgttttacttctggtcggcacgctgttgctggcctggtccgcggttcgccagcaagagtctacgctggcgattcgtgccgttcatcaaggcacaacgatgccagacggtttttcaatctggcatcaccttgacgctcatggcattcctttcaaaagtatcacccccaaaaacgacactctgttaattacctttgactccagcgaccagagcgccgctgcaaaagcggtcctcgacagaacattgccccaaggctacatcattgcgcagcaggacaataacagtcaggctatgcagtggctgacccggctacgggataactctcatcgcttcggataacttcctgttgtccgaaacagatcactcactttggtgatttcaccgtaactgtctatgattaatgaggcggtggttaacactaccgcttcgttgtctggacaatcgttcctttgtaataggtccgaatcacaatggaaggttcaagaatgaaataccgcatcgctttagctgtttctctttttgctcttagtgccggtagttatgccactaccctgtgtcaggaaaaggagcaaaatatccttaaggagatcagctatgccgaaaaacaccaaaaccagaatcgtattgacggtctgaataaagccctgagtgaagtccgggccaactgttcagatagccagctgcgtgccgatcatcagaagaaaatcgcaaagcagaaagatgaggtggcggaacgccagcaagatttagccgaggcgaagcaaaaaggcgatgccgataagattgccaaacgcgaacggaaactggcagaagcgcaggaagagctgaaaaagctggaagcgcgcgactactaactcacaatagtcactacttactcacctggagaaaactatgtcgaaagaacacactacggaacatctgcgtgctgagttgaaatccctttccgatacgctggaagaggtgcttagctcatctggcgagaagtcgaaagaagagttgagtaagattcgtagcaaagcggagcaggcactgaaacagagccgttatcgcctgggtgaaaccggtgatgccatcgccaaacaaacccgtgtcgcggcggcgcgtgccgatgagtatgtgcgtgaaaatccatggacgggcgtgggcattggcgctgcaatcggtgtagtgctcggcgttctgctgtcgcgtcgttaattatggcggacactcatcacgcgcaagggcccggtaaaagcgttctgggcatcgggcagcgaattgtttccatcatggttgaaatggtggaaacacgtctgcggctggcggtggttgagctggaagaggaaaaagctaatctctttcaacttttactgatgctgggcctgacgatgcttttcgctgcatttggtcttatgagcctgatggtgctaattatttgggcggttgatccgcaatatcgcctgaatgcgatgattgccaccaccgtggtgttgctgctactggcactgattggcggtatctggacgttacgtaaatcgcgtaaatccaccttgctgcgccatacacgccatgagctggcaaacgatcggnagctgctcgaggaggagtcccgtgagcagtaaagtcgaacgtgaacgacgtaaggcgcaactgcttagccagatccagcaacaacggctggatctttctgccagtcgtcgtgaatggctggaggcaacaggcgcttacgatcgtcgctggaatatgctgctaagtctgcgctcctgggcgctggttggcagtagcgtgatggcgatctggacgattcgccatcctaatatgctggtccgctgggccagacgcggttttggcgtatggagcgcctggcgtctggttaaaacgaccctcaagcagcaacagcttcgcggttaacttccctctggccggagccattccggccttacccatcaaattttttgaagatttttgacagttttccttgctaacaatcatcattcaccacgtttatgattctctccatcgacagcaacgacgctnataccgcgcccttgcacaaaaaaacaatcagcagcctgagtggcgcagtggagagtatgatgaaaaaattagaagatgttggtgtactggtagcgcgcattttaatgccgattctgtttattaccgcaggctggggaaaaattactggttacgcgggtacccaacaatatatggaagcgatgggcgtcccgggttttatgctgccgctggtgattctgcttgagtttggtggtggtctggcaatcctgttcggtttcctgactcgcaccacagccctgtttactgcgggctttacgctgctgacggcatttttatttcacagcaactttgctgaaggcgtcaactcgctgatgttcatgaaaaacctgacaatttctggcggattcctgctgctggcaattaccggtccgggcgcgtatagcatcgaccgcctgctgaataaaaagtggtaagcacgcgctatacttaacgataaaaaacgaggaggaagctcctcgtttttgctattggaggagagaacaatgggtcaactgattgacggcgtctggcatgacacctggtacgataccaaatctaccggcggtaaatttcaacgttcagcttccgcatttcgtaactggctcactgccgatggcgctcctggccccactggcacaggcggttttatcgcagagaaagatcgttatcatctctatgtttcactcgcctgcccgtgggcgcaccgcacgctgatcatgcgcaaactcaaaggactggaaccgtttatttccgtttccgtagtgaacccgctgatgctggaaaacggctggacctttgatgacagttttccgggagcaaccggagacacgctctatcaacatgaatttttgtatcagctttatntccacgccgatccacactacagcggacgagttactgttcccgtgctgtgggacaaaaagaaccacaccatcgtcagcaacgaatcagcagaaatcatccgcatgtttaataccgcgtttgatgcgctgggcgcgaaagcgggtgattactacccaccagccctgcaaacgaaaattgacgaacttaacggctggatttatgacaccgttaacaacggcgtgtataaagctggttttgccaccagccagcaagcctacgacgaagcggtggagaaagtgtttgaatcgctggcgcgactggaacagattttaggtcagcatcgttacctgaccggcaaccagctaaccgaagccgatattcgcctgtggaccacgctggtccgttttgatccagtgtatgtgacccacttcaagtgtgataagcaccgcatcagcgattaccttaatctgtatggcttcctgcgtgatatctaccagatgccgggaattgccgaaacagtcaatttcgatcatatccgtaatcattacttccgcagtcataagaccatcaaccctacgcggattatttcaattggtccgtggcaggatctcgatgaaccgcatggacgagatgttcgcttcggttaaaaaaagcaccttacgaggtgcctctgataattagctaagtgcatgttgttcatgtcggatgcggcatgaacgccttatcaaacctacaaaacttttatattcaatatgttgcaatgaccgcgcgggccagataagcgtagcgcatctggcaattttgcgcttgtcatcagtcttagcgcgccttcacagcactttattaattccttgaacgaatatttactgccatttcattcacgtctattcttaatttgctgctttaaaaacaagtgattgagcaaaattgaggcaaaaatggactggtatctgaaagtactaaaaaattatgtcggtttccggggtcgtgcgcggcgcaaagagtactggatgtttattctggtcaacatcatctttacgttcgtgctggggctgctggataaaatgttaggctggcaacgcgctggtggcgaaggcatcctgacgacaatctacggtattctggtgtttttaccgtggtgggcagttcagttccgccgcctgcacgacaccgaccgctcggcgtggtgggcactgctattcttaatcccgtttatcggctggcttattatcatcgtctttaactgccaggcgggtacgccaggcgaaaaccgctttggacctgatccaaaactggaaccttaaaacaaatctgctcgccggatgtctgactcatccggcttttatcatcatgttgatgaatgaataatttactaatgtttatttaaaatatttcaatgtcgttatataaattacctataaannnnaccatgtatttatcttaaatatcaaaacctttataacatccgaaaaagaaagatacgaatagcatttacacaatacccggaatagactttcgtcacttttaattaaagggatgtttttatgcagtggtatttatccgtattaaaaaattatgttggtttctctggtcgcgcacgtcgtaaagagtactggatgtttactctgattaacgccatcgtcggcgctattatcaatgtcattcaattgattttaggtctggagcttccatatctgtctatgctttatttgctggcaaccttccttcccgtccttgcgcttgctatccgtcgcttacacgataccgaccgttcaggtgcctaggccttgctcttttttgttccgtttattggctggctcgtgcttctggtttttttctgcacagaaggtacttctggcagcaatcgttacggaaacgatccgaagtttggttcaaattaatcttagaattggggcgatatttcgcccctttttatta

SEQ ID NO: 1502 - DNA, 2548 bp, Escherichia coli
  Strain O55:H7
  modified_base (458)..(458): a, c, g or t
  modified_base (505)..(505): a, c, g or t
  modified_base (812)..(812): a, c, g or t
  modified_base (1179)..(1179): a, c, g or t
  modified_base (1390)..(1390): a, c, g or t
aatattattttccgttaaaaagtttgggaatttcccgcagacaccaggatttcgcttcccccatactgtcacgacgccaggccataataatatcgatctcgctggtcgattccgggctgacgacacgcaaccgcccttccgcaatatctttttcgaccatcggatacggcatcgtcgccacgccaagccccgccagtaatgcctgacgtttatcttcaatcgtgctcaccgttaagcgcggctgtttgtccagcagctgtacagtcaacaccgggcgctcacgagcggtatccgccaccgcaattccacgatatttcacacgcgtcacttcagataacggttccggctcctgatgaatcgggtgatcaggcgcggcaacgtagacgttcattaacgtatagagcttgcgcgagttgatctccgacgaggaacgaaaatgcatatccggcgcgataacnatatccgcccgcccctgctccagccgttcccacgcccccgccagcanttctgtgatgattgccagttgggtattggcttttgccgccagtttgtcgattaacgggaaaaaggcaggtgtcggtaccagcgcttcggtcacaatggtgagatgcgtttcccaaccgcgcgcgagagcttccgcatcagtagtcagtttatctgcggcttccagcaaaacgcgccctcgctccaacaacatcctcccgacattggtgaatttggtgcgatggcccgagcggtcaaacagcaccacatccagctcttcttccagtttttgcatggtgtagctaagtgcggaaggcacgcgtcccagntcatccgctgccgccgcaaaactgccccggcgatcgatcgcatccataacccgtagtgcttccagcgttaatgccctttctttggccatttcgttctcattcaggaaatttgaacataccgggcagaatatctggctaacaatgtagcgtccagccccttaccataaaaggaagtaaagagaggtcaagaattatgattactacccgaactgccaggcagtgtggacaagcagactacggatggttgcaggcccggtatactttttcctttggacactacttcgacccgaaattgttaggctatgcctccctgcgtgtgcttaaccaggaagtgctggccccaggtgccgcctttcagccgcgaacntatcccaaagtcgatattttaaatgtgattctggatggagaagcagagtatcgcgacagcgaaggcaatcatgttcaggccagcgccggtgaggcgttgctgctctctacccagccgggtgtcagctacagcgaacacaatctcagcaaagacaaaccgttaacacgaatgcagctttggctggacgcctgcccgcagcgagagaatccgntgattcaaaaactggcgcttaatatgggcaagcagcatttaatcgcctcgccagagggtgcgatgggaagcctgcaattacgccagcaagtgtggctgcaccatatcgtgctcgacaaaggcgaaagtgcgaatttccagttgcatgggccacgcacgtatttgcaatcgattcacgggaaatttcatgcgcttacgcatcatgaagagaaagcggcgctgacctgcggtgatggggcgtttattcgtgacgaggctaacattacgctggttgccgattccccactgcgcgctttgctgatagatttgcctgtctagttgtttttacagggagatgatgatgagtaaaaaatcggccaaaaagcgccagccagtgaagcccgtggtggcgaaagaacctgctcgcaccgccaaaaattttggctatgaagagatgttgagcgagctggaagccatcgtcgcggatgctgaaacgcgtttagccgaggatgaagctaccgcgtaaagacaggttgccggatgcggcgaaaacgccttatccggcctacaaaatccaacaacattaacgaattaaacaacccgtaggccggataagatgcgccagcatcgcatccggcacgatacccaaaacctggcgtttatctggccttgctcgccataatctcgataatctgccgatccgtttgctgcatcgaatggcttgctaacgcacacaggttggcaatcgactgctcaacatcatgcgccacgatcccttcattgccggtcacggcggtatcatccagcgccattaacaccgctttccacgcagccgaagcactggtcgaaaccttcatcgcgcagctgttcgacgcaccatcgcaaatcatgccgctgacatcgccgatcatactgctgatcgccatcgagatggtttcataacgcccatccaccagccatgccatcccggcggcggcccccattgctgcggtcgttgcggcacacagcgcagacaaacgcggtaactggttatggatgtaaattgcgctcaaatgagaaagcatcagcgcacgcgccagccgttcatcatccgctccgaagtgttctgctaccaccaccacgggcattgttgcggtgatcccctggttacccgagccggagttactcattgccggaagcg

SEQ ID NO: 1503 - DNA, 11621 bp, Escherichia coli
  Strain O55:H7
  modified_base (2835)..(2835): a, c, g or t
  modified_base (4653)..(4656): a, c, g or t
  modified_base (6524)..(6524): a, c, g or t
  modified_base (10240)..(10240): a, c, g or t
  modified_base (11378)..(11378): a, c, g or t
  modified_base (11380)..(11383): a, c, g or t
  modified_base (11615)..(11618): a, c, g or t
acgcgcatcggatgccgcgctggtacgaatcacaatggatgaagagagatctttcgccagcaaaccgcgctcgcactgtttttccagcgtcgcgccaatatgcagcccccacttaccgctcaaaccttcctgcgataacgcacaatttagcttcgcggaatcgagaataaagcggatcgccgcaaacgggacttcattgacgaacttcaggatctcagccagcgtcgttctggaaagcaccgatagcggagactcttgctcgccctctgccacacacgcctgctgggtaaacaccacaccatcgtgcgtctcaatatgcacaatgttggtatgcccgccgacgatagtgacacacgcccacttctcaccgttccagactttggcgcgtgagaagaggatttcattgcaaggttcctggatcttaacggagactttccccgccgccagcagtgctttggcatcggcaattgcctgcgcagttgcgtctttcagcacttccagcccggcgttggcatttccacctaacgcccccagcgccgccgcaatcggcagccccaccattcccgtgccgggaacggtgacgcccagaccgttcttcatcagatttggcgaaacccaggcttctacacgttcaaccggaccttccagttctgccgcagcaaccgccgccgccagcgccagtgaaatcggttcagtacatcccagcgccggttttacttcctcctgaacggcgaggatgtaacgctgccataacggatttaaagtcgaatcaaacatattaaaaaccttaaaatttcaggtaaatcaagaaaatgccaggaacggagaaacacaaagcaacaaaccagtgacgataatcaggtacagagacatccctttgtatttgtgcaatgccggtactttgtaaaccagccacgccgggatcaggcaccctaccaagccgaaaatcgggctacagatagaggtgaagctcaacaccggtgcgttcagtacgatggcgctccaggccagcaaaatggcgaaaatcatgatgccgcgctgaacaagattttcgttaatcttctcggcaggcatcttgcgacgcaggatgttcattacgatcccttgcgttgcttcgcgaaaacctaaatagacgccaaagaatgcagtcatgacagcaaagatattgagaatgacgctgaccactttcacccacgctgcgccgtcaccgctaataaactgtgcggcaatcgccagcgcggaaatattctgctcgtaggcttttaccgcttcgtcatgtcccatcgccagcgtgaacgacacggcgtagaaaaagacggtgataaacaaaatgccaaacgcgatattcattgcccgcaatgctttatgccgcgctacttcaatcgatttttcccgcgagcgataagagatcaccatcgggcttaacgtctggataaacagaatcgacgtcagggtaaacggcagcgtaataatagcgtttttcaccagcagccccagcggcggtagcgaaccgacgttatacagatgccacattcccaccatcgacacgcccagcgccgcgaccaccagcagcttggtcagcaccatgccagtcgaaattttgaataacaatttctcgccgcgtgaagagatcgccaccagaatgcaaatcagtaccagaccataaaagggactgtctgacagcaacccttccgtcacgccgaaggtatgcaggtaggaagcactatcgttggtgatggcggtggaatagacgaacatccaaatcaccagcattacgaaatagagtgcacctaacaggatgccccagtttttacctaaataaccgctaatgacgctcgggtaatctttacattctggtgattctgccagcgtattaataaacaaccgctgaaacagatacattgccgggtaaccaatcaccgatgagagcaaaaatacccacaatcccatcaaaccgacctgcaccgggagaaaaacaatccccgcgccaatcgccatcccgatactcataatcacccagccggtgtcagtactgtcgaatttgatcgcttctcgccactcgctctcactcattccagcacgacccgccggggtcgaagcgtctgcaatgacgcctttattcgatgcaatttccataatttctcgctcaatattttgtagggcttattatttttttccgagccgcatcaaggcgatatgcggtctacgtttttgcaggcgagttattagaataaagaaatgatacgcgcgaggtcagagaaaatcttcacaatcaagactttgaaataacggagatggataagaattttctactaaattaatcgcaagagaatattcattctctatttgcggcagatcacaaaaaaaaggtgcacatttgtgcacccaaggatgaaagctgacagcaatgtcagccgcagaccactttaatggccagtcctccgcgtgatgtttcgcggtatttatcgttcatatctttgccggtttcatacatcgtctcgatcactttatcgagtgaaacacgcggtgccgaggtgcggcgcatcgccatccgcgcggcgtttactgctttcacggcattaatggcattacgttcaatgcacgggatttgtacctgtccggcaaccggatcgcaggtcagtccaaggttatgctccatcgcgatttccgccgcattgcatacctgcgccggactgccgcccagtagttcagttaaccctgccgccgccattgaacaggccacgccaatctccccctgacagccgacctccgcgccagagatggaggcgttcattttatacagcgcgccaatagccccggctgcaagaaaatagngggcaattgaccgctcgtttaccggacgacggaacttatcgtaataagccagcactgccggaataatgccgcacgcaccgttagtcggtgccgttaccacgcgcccgccagctgcgttttcttcactaaccgccagcgcgtacatgttgatccagtcgatgacattcatcggatcgttagagatgttatcgctggaaaccagctgacgacgcagcgctacggcacggcgcggcacattgagcggaccaggcagcacgccttcagtgttcatcccgcgttcaataccgtcatgcatcacttgccagatacgggcaaaaccggcgtcaatttccgctttactgcgcagcgctagctcgttgtgcatcatcaggccagaaatagacaggccgttgtaatcacacattttcagcagttcacctgctgagtggaaatcgtaaggtacgggtgtttcgacatcgtgcgacaggccgaagtgttcttcttcgacaataaacccgccgccgacagagtaataggttttacttaatagctcttcctgtgccttccaggcagtgatccgcattccgttctcatggcgaggcaacatttcgggatggaagataatgttctttgctacaggaaaatcaacaatatgcgcaccagatgccactggcagccgcccgctgcgcgttactaactctataaatgcagggatctcatcaatgacaacatcctgcggactgtttcctgccagtcccatgatgatggcgacatccgtggcatggcctttgcccgtcagtgacaacgacccgtacagatcgaccacaatatggctcgtcgcggttaataagccgctactttccagccgatcaataaaactttttccggcattcattggccccacggtatgcgaactggagggaccaatcccaattttgaaaatatcgaatgcactaatcatatccacaccctcggattgccgttcagtgaagtggagcggaacgaccttacgaccgtcccgctcacgaggctttacgcactacgtactgcgatagcttcaatttccagcttcacatctttcggcaaacgcgcgacctgtacacagctccgggtcgggtaggtcgcctgatgctcatcgaagaattgcttatagacttcgttgatggtggcaaaatcattcagatcggtgatgaacacggtcatcttgatgatatcgcccacgctcagcccggcagcaaccacgatcgctttgacgttttcgaggcttaaacgcgcctgatcttgcacatcagccgggatctcaccggtctgtgggcaaaccggaatttgaccggaggtgaagaccatgctgcctaaatcaacgccttgaacataagggccgattgcgcctggggcacgttgcgtttcgataatctttttcatacatcctccggcgtcagagcgcctgggtaaaggtacgtgaaataacatcctgctgctgttcacgggtcagtgcgttgaagcgcacggcgtagccagagacacggattgtcaggttaggatatttttccgggtgctcgatggcatccagcagcatttcccgattcattacgttgacgttgaggtgttgaccgccttcgacatccgcttcgtggtggaaatacccatccagcaggccgacaaggttggttttacgtactggatcttctttgcccagcgccgcagggacgattgagaaggtgtacgagatcccatctttggcgtaggtgaacggcagtttcgccaccgacgtcaatgaggccacggcacctttgcggtcacgaccatgcatcgggttagcgcccggcgcgaacggtgttnnnncgcgacgaccgtccggcgtgttaccggttttctggccgtacaccacgttagaagtgatagtcagaatcgactgggtagggacggcgttgcgataggttggcagcgctttaattttcttcataaaacgttcaaccaggtcgcaggcaatgctgtctacgcgctcgtcgttgttgccgtactgcggatattcaccgtcgatttcaaagtccaccgccaggccgttttcgtcacggattggtttcacgcgggcatatttgatcgcagacagggagtccgttgccaccgacaggcccgcgatgccgcacgccatggtgcgatagacatcacgatcgtgcagcgccatcagcgaagcttcgtagctgtacttgtcgtgcatgtagtgaatgatattcagcgcgctgatgtactgcaccgccagccagtccatgaagtgatcgaggctgtccatcactttgtcgtaatccagcacatcgtccatcaacggtgccgttttcggcccgacctgaatcttcagcttctcgtccaccccgccgttaattgcgtacagcagtgttttcgccaggttagcgcgtgcaccaaagaactgcatttgcttaccaatcaccattgggctgacgcagcaggcaatcgcgtaatcgtcgctgttgaagtcagtacgcatcagatcgtcgttttcatactgcaaggaagaggtgacgatcgacacctgcgcggcatattttttgaaggcaatcggtaattcttccgaccaaagaatggtcaggttaggttccggtgcaggccccatagtgtgcagggtgtgcaaatagcggaaggagtttttggtcaccagcgtacgaccgtccagccccatcccgccgatcacttccgtcgcccagattgggtcgccggagaacagcgaatcaaattccggcgtacgcaagaagcgcaccatacggatcttcatgatgaagtgatcgatcagttcctgtgcctgctgctcattgagtacgccagctttaaagtcgcgctcaatgtagatatccaggaacgatgccgtgcggcccagcgacatcgcgccgccgttctgtgatttcactgccgccagataagcgaagtagagccactgcaccgcttcctgcgcattctgcgccgggcgagagatatcaaagccatatttcgccgccatttcctgaatctgcaacagcgcatgacgatgctctgccagctcctcacgcagacggatggtggcttccagatcctcgcctttttccagacgagactggagatcggcaaattgcagttcgcgttcacgcaccagataactgatgccatacagcgctacgcggcgatagtcaccgataatgcgcccacggccatagccatctggtaaaccggtcagcacgccagatttacggcagcgcagcatatccggtgagtaaacatcaaatacgccctggttatgggttttacgcagatcggtaaacagatattcaaattcactgtccatttcacgaccataggcgtggaatgaacttttaatcatattaatgccaccgaacgggtgtaacgcacgtttcaacggcgcatccgtttgcaggccaacaattttttccagcggctggttaatatatcccgcatcatgagcggtaattgtggtggcaatattggtatcgaaatcaaccggcgcgtgggttgcgttttcaatacgaatgccttccatcaccttttcccacaattccgtggtggctggcgtcgcttcagcgaggaaagattcatcgccttcatacggtgtatagttatgttgaataaaatcgcggacattaatttcgtttttccagtccgtacctttaaagccaagccatgcgtcggcgtacagcttatcgctngtatcaatatctaccttcatgaaaaataatctctctacaatacttcaactaaattatgcaaattctgcgggtgcgttaactttgcctaaatgaatggcatccaaagcaatcattttttcttcgttggtcggaattacggcgcaaatgacacgcgcattttcactggaaacaattcgctcgccaaaagagttagatcgattattcatttctgtatcaatctctacgcctaatacagccaaatgttccatgaccagacgacgaattaaacttgaattctctcctattccgccggtgaatataattccatccaggcgacgtaatgaagctgcgtgtccggcaatatgacgggcaattcggtgaacaaaggttttaattgccagctgcgcgcgttcgtgaccttcatgccaggctttttccagaacacgtaaatccgaagaaaggccggaaatacctaataatcccgactctttattcactacgcgttccaggtcccccaggctctggttggtttggctggcgacccaggacatcgcaccaaagtcgacatcgccactgcgggtacccatcatcaagccttccagcggcgtcattcccattgaggtgtcaacactctgaccgttgcgaactgcgcagattgacgcgccattgccaagatgcgccacaaccaggccggagtcatcttccgccagattcagcaaagaatgtgcgcgctgggaaacatagcggtgcgacgtgccgtggaaaccataacggcgtacacctaactcttcataatatttccacggcaggccgtataaataagcttccggagccatcgtctggtggaaactggtatcaaataccgccacctgagttacgcccggaaataattgctgcgccgattcaataccacttaaattggcgtaattatgcaggggtgccagtggagaaacgcgacggatattatcaatgacttcatcggtaataatggcggactcggtaaaaatactgccgccgtgagcgatgcggtggccaattaaggccacgctgtcatttaaattccgtttttccagttcaaatgcaattgccttcaatgcaccttcgtagctgtggtgagccagcggtgctggctctcccccatttacggataagaatgcattttccgagttaataccgtcggcaatacctgacattaatacttcacagtcgctggcatcgagtacggaaaacttaatcgaagacgaaccacagttaataaccaaaacaaccgggaattcattcatctcttttctcatcctgagttacggattaaaacagtttatatacgatgttcaggatggtcagcagaccaatcacggtaacaaacacgttatccagacgaccacggtatttcgccagagacggcgctttacggatggcatacatcggcaacaggcacagcagggatgcgataatcggtgcgcccatggcttcaatcaggtcgaggatgttcgggttggcgtaggcaacaacccaggtggagcccatgatgaagatcatgctgatagtgttcagtttacccagcgatactttagttttgtcgcctttataaccaaacttcaggaccaggccattcagaccttccagcgttcccagatagtgaccgaagaaagatttgaagatagccacgagtgcgatgatggaagccgcatattccagtgtaatcgcgaacgttgttttggtaccggtcatggacgcaaagtggttagccagataagaaagcactggaatattctgcgctttggcttccgccatgttggccggagacagcgtaaacaggcagctaaaggcaaagaacatcaccactgcaaccatcagcatgctggcacgagaaatgatttgggaacatttacgttcggtgaagtcgcgaccgaagtctttctcatactcttcacgtttagaaaccacgaaggaagagacgattggcgagaagttaaaggagaaaaccatgatggaaatccccagccagacagtgatcaggataccgtcatgaccggttaacgacagcgaaccgaggtcaacctggtcgataactgcagagttccagtaagggatcagcgacaaagaaatcagcaccaggctggcgataaacggccataccaggtagctcatcactttaaccatcagatccttaccaaaccagatgacgaaagccatcagcagcaacaggaacagcgccacaaagccgcgattcagcggtgcaaagccgagctggttttcccagaacgtcataaaggtattggtaatagtaacgccataaatccacagcagtgggcaaatcgcgaagaagtacaggaacgtgataaccacgccgccagttttaccaaaatgctcttccaccgtttccgtaatgttgccggaagggttagagccagaaagacacagacgcgccagcgcccggtggcaataaaatgcgatggggtatgccaataccaacatcagaagaatcgggatcagtccgccaaaacctgcgcggatagggaagaacagcaccccggcgccgattgccgtaccaaacaagcctaacgtccatgtggtatctgatttacgccaggacgattgttttgtctggctggatacaatgctatctgaagtactcatatcctatcctcaacgaattaattaagcgtcaacgaaaccggtgatttgagagacgcgagaaagatcgatattgccgccggaaataatactgacggtttttctgttttgaatatattggtctaatttaccgcttaataatgcagcacatgccagagcgcctgcgccttcggtgacgactttattgcgctgaattaaggcaatcatactgtttctgatttcgtcttcgctgaccagcacgatgtcatcgactaattcacgaacgatttcgtaagttaaattacccgggcgggagacatcacaaccatccgccagggtgccggtagttcggtgcgtggttatttctccggagtggaaagaagccgccatgccgtgaacgttttcagactgtacgccaataacacgaatggtcgggttaatagatttaattgccaccgcaataccagcaattaaaccgccaccaccaattggcacaatcacgttatcgacatcatagagatcttccataatttccaggccaatcgttccctgaccagcaatcactttcggatcatcgtaaggtgggataaaaatacggccttccatttcgacaatttcgctcactttagcgatagtgtcgttgaagttatcaccatgcagaacgacttctgcggagtagtcgcacgttgccgctactttggatttcggcgcgccttttggcatcaccactttaccgtcgatacccagcatcgcgcaggagagcgaaaccccttgcgcatggttgcccgcagaacaggccaccacgcctttgcgtttttccgcatcagtcagtgaacttaatttattaaatgcgccacgaattttaaatgaacccgtacgctgcatattttcaaacttcaggaatatttcacctttgcaacgttcactaaaatagttggagcgaggcatgcctgttttataaattcgcccagccagtcgttgtttcgcttcaataatgtcatcaatagcaaccggcagatcgtatgtaatatgcattataaaacctcttcgcctgaattaaatatgtaggtaaccgtaaccgacacctgcaagacagacaggtggattatttatgtttaaanaaaaacaaataactaaccaacttctattaattgccttcgtctacacccattataagatgaatactctttggctaattccaccaaaaccgatgctgcttttttaatacgataatttttcgaccataccgcggcatattgtgccacaggtaatgtttcttcaaccggaatagtaataaattgattagaaccaaaaggagacgtcatatcacaaggaattacagttaagaaatcagcattgagaacaagattataaattgtcacgactgagtcggttttaacgatgttttcaatactgatgccatttctttgtaacgtagtaagcagttcgctgtagtaccccatattagtttgtggcaacacccactgttcgttcttcaacgactccagcgtggtggtgccggtgcatgttcgggacttactggctaccagcacaaactcggactcgaacagcggctcaacatgtaaatcctgaagcttcatttctgcgcttaacgtaccaatcgcaaaatcaagtcgaccgtcgcggattgccggtaagaacgaagacagttgcgcttcatacatagaaacctgcgctttcgggaacacctctttgaacttgttgatcatccctgacataaaagtaaaaccaatcaatgaaggaaaaccaaatgagacttccaccaccgcctcagaagacataccgcttatctcattaaccatatttttcatttcacgggtaatggattcggaacgagagagtaacaattgaccggcaggtgttaatgttactccggtatttttccgcaccactaattccacaccaaaataatcttcaatatcgttaatgattttactgacggccggttgagttaaccctaattcttttgcagccgagccgatagaaccacttctaatgacttcctgaaagactaccaggtgctgcgttttcggaagaagaatagtgctcataacgacctacgttaattacctcattgacggcatgaagtgtatcaaaatgaaatgaacaggatatgtgcgaccactcacaaattaactttcaatactttccagggtatcgtcatgccaattaaatacctttaaatatcaataagttaaagtataaaaatcagcataaaccctgatttttgtcaaaaanannnncggggataaccatattttatggcgataacatcattcgttatgtggttaatacaaaaaaggggctgagaccatatttcaagcaattaccggataattaccaggcaaaatttgagttaaatttaatgagcaagttctcaaattttattataaataaaccattttcagcgataaataatgcggcacgtcacattttttcacgctatttgttggagaacaaacatttattttatcnnnnttt

SEQ ID NO: 1504 - DNA, 7013 bp, Escherichia coli
  Strain O55:H7
  modified_base (313)..(313): a, c, g or t
  modified_base (823)..(823): a, c, g or t
  modified_base (1457)..(1460): a, c, g or t
  modified_base (2602)..(2602): a, c, g or t
  modified_base (3136)..(3136): a, c, g or t
  modified_base (6858)..(6858): a, c, g or t
ttcgaatacaggtattgatcatctcgaacaattgattaacgtcaactttttctcttctgacaggacgtcattttgtgaatgcaatcgttttccataaattcttctcccttcataggcgacgaatagcattttgtgttgaggatcacaaaacgaataattgctgatcgccgcgataaggtcagacaaagacaacaagggaaattttcacagagcttttgatcggcgtaggccacagaatgttgcttcgtttactgtaacgccgggtaaatgagcgttttttgatagtgcgaaagaaccctgcgaggaaaataancatctattattgtttgtcatgatgacaaggcaggcatcaatgaaaggcttcccaattgcacatatttttcacccttcaatcccaccaatgcacgcagtggttaacaatcacaatagaaatattgattattggacggtaaaaagaaagtttgcagaaattgtctccaccaatgacgttaataaaatttacagtataagtaatgaactgcggagagtattatctgcaattactgcattgaatttctatcaaggcgatgttccttctgtcatgatccgaatccaaccggaaaatatgagtccattcatcatagatatttctacaggagaacatgacgattatatcatacaaacattagatgtaggcacttttgcaccttttggcgaaaaatgtacttgctcagccgtcaataaaaaagagctggaatgtattaaggagacgatttctaagtattgtgcaaaattcacccgaaaagaagccatcttaacaccccctgcgtactttaataaaacnagtattacttcagattgttggcaaattctctttttttcacccgatcattttaataatgatttttattgattatttataaaggataaaataatgttccctgtttcatcaattggtaatgatattagtagtgatttagtccgtcgaaaaatgaatgacctacctgaaagcccaacaggaaataacctcgaagcactagcaccaggtattgaaaaactaaaacagacctctattgaaatggtcactttacttaacacgttacaacctggtggaaaatgcattatcactggtgattttcaaaaagaattagcgtacttacaaaatgtaattctttataatgactcgtctcttcgtctggattttttaggttataacgcccaaattattcaacgatcggacaatacttgtgaacttaccattaatgaaccgttaaaaaaccaggaaatatccacaggtaatatcaatattaattgcccattaaaagatatttacaatgaattcaggaggttaaacgtaatttttagttgtgggactggagatatcgttgatctatcctctctggacttacgtaatgtcgatttagattattatgatttcacagataaacatatggctaatactattttaaatccttttnnnntgaattcaacaaattttactaatgccaacatgtttcaggttaattttgttagttcaacacaaaacgccaaaatctcctgggattatttactaaaaataacgcctgttttaacaagcattagcgatatgtattctgaagaaaaaattaagtttgtcgaaagttgtttaaatgagcttggagatattaccgaagaacaattaaaaattatgagatttgcaattataaaatctataccaagagcaactctcacagataaattagaaaatgatttaacaaaagaaatatataaaagctcatcgaaaatcaataattgcttgaacagaattaaattaccagagatgatagatttctcatcagaaaaaatacataattatatcgacataatcattgaagattatgaaaatatcaaagaaaatgcttatctggtcattccccaaattaattatactatggatttaaacatagaagactctagctcagaagagttattttcagataacaccctcgagaaagacgaaaattctccggacaatggttttgaggtcggggaatataacacatatgaagcatataactcagagaatcaatattttaccagagagaactatacgtataattacgaccttttaaatgcaatatagacttaataacttcttacaaagtctwttattaataccgtagatatttattcatcttaccctgtgcaccaaaagcaaaaacccgccgaagcgggtttttacgtaaatcaggtgaaactgaccgataagccgggttctgtcgtggacagtcattcatctaggccagcaatcgctcactggctcaagcagcctacccgggttcagtacgggccgtaccttatgaacccctatttggccttgctccgggtggagtttaccatgccacggactgttaccagccgcgcggtgcgctcttaccgcaccctttcacccttacctgatcccgcttgcgcgggccatcggcggtttgctctctgttgcactggtcgtgggtttcccccccaggcgttacctggcaccctgccctatggagcccggactttcctcccctccgcccgtctcccccgaagaggacgacgacgaagcggcgactgtctggtcagcttcggcgcgcagtatagaggntttgcgcgcccttgtcaccccgcgttgcgcattccaatcgccagtgtcgcggcgatattacgtgaagcacggcagatattgtcataagccccgcggaatgcttcgtccaacgtacctatgctggtcaatacgctgaagaccgcatcaatgccatgctgatgtacaacgccaacatcatcggtcaggctacccgcaatgccaatcaccggtttatggtacttcttcgccacgtttgcgacaccaatcggtaccttgccgtgaatactctggctgtcaatacgcccttcaccggtgatcaccagcgtacaatcgtgaatatgttcctccagattcagcgccgtagtgacgatttcaataccacttttcagttccgcaccaagaaacgccattagcgccgcgcccataccacccgcagctcctgcgccggggacatctttcacatcaacatgcagcgcttttttaatgacctcggcatagtgagagaggttattgtccagctcaacaatcatcgcttcactggctcccttttgtggnccaaagatgcgcgatgcgccgttatcgcccaccagcggattggtgacatcacaagcgacgcgaatgacgcaatcttttaagcgcggatcgaggccggaaatatcaatatcattcagagtattaagactaccgccgccaaaaccaatttcattgccgttggcgtcgcataatttcgcccccagcgcctgtaccatgcctgcgccgccatcatttgtagcgctgccgccaatgccgataataatgtttgtcgcgccgctctccagcgcctgcaggattaactcgcctgtgccgcgtgaagtggtcacgagtggatcgcgtttttccgcaggtaccagctccagcccactggccgccgccatttcaataaacgcggttttgccatcgccggagatcccccaactggcattcactttctcgcccagcggccctgtaacccaggcgtgacgttcggaaccctgggtggctgcaatcatcgcttccaccgttccttcgccaccgtcggcaacaggaacagaaacgtactgtgcatcaggaaaaatttcccgaaatcctttttctatcgcctgcgcaacctcgctggcagataaactttctttataagagtctggggcgattacgattttcatacctatgcctgttaccacatgacgccggagggcgtttctcttattcggcctggattccaggcccggattgcaatacgccatccgggcacgacgtcattaacgagtaacttcgactttcgccagtttttcgtagtagcacgccagggcgctatgatccgccgttcctaaaccatctgcacgcagtgcctgcatcatctccataaccgcagctgtgagcggcagttgtgcgccgacgccgtgagaagtatccagcgcattcgccagatccttaatatgcagatcaatacggaagcccggcttgaagttgcggtccatcaccatcggcgctttggcatccagcacggtactgcccgccagtccaccgcgaattgcctgataaaccaggtccgggttaacgcccgctttagttgccagcgttaacgcttctgacatcgcggcaatattcagcgccacaatgacctgatttgccagtttggtgacgttacctgcaccgatttccccggtatgcaccacggaacccgccatcgctttcatcaaatcatagtatttgtcgaaaatagccttgtcgccgcctaccatcactgacagcgtaccgtcgatggctttcggttcaccgccgctcaccggagcatccagcatatcaatgcctttcgctttcagcgcttcgctgatttcacggcttgccagcggtgcgatagaactcatatcgatcaataccgtacctggcttcgcgccttcaataatgccattctcacccagcgccacctctttcacatgaggggagtttggcagcatggttatgatgacgtcgcactgttcagcgatcgctttagccgtagaagctgtttctgcacctgcagcaatcacgtcagcaatagcttctgggttacggtcagcaaccaccagcgagtaacctgctttcagaaggtttttactcattggtttacccataatccccaggccaataaaaccaactttcatagtcatatcaatcatctctcttgttgcggtggtggttattttttaaaggtatcagccagtttctgagtggcagagcggaagacgccgagatcgctgccgacagccacaaacgtcgcgccccattccagataacgacgcgcatcggcttcgaccggcgcgaggataccgctgggtttgccgtgcgcgctggcacggttaaaaatgtgctgaattgctttttgtacatccgggtgtgatgcattgccgagatggcctaatgccgcggccagatcgctggggccgacgaagatgccgtctacgccttcggtagcggcaatagcatcgacgttatctacgccctgctgactttctatctggaccagaatagtgatgttcttgttcgactgagcgaaataatccgccacggtgccaaacatattggcgcggtgagaaacggagacgccgcgaatgccttctggcggataacgcgtcgatgccaccgcctgctctgcttcctcttttgtttctacaaaaggaatcaggaagttatagaaaccgatatccagaagacgcttaataattaccggctcgttggtcggcactcgcactactggcgcgctggcgctgcctttcagggccattaactgcggaataaacgttgaaatatcgtttggcgcatgttcgccatccagcaccagccagtcaaacccagccaaaccaagaacttcagtgctaatcgggttagagagtgctgaccagcaaccaatttgtacctgtttcgcagccagtgcggctttgaatttattcgggaaaacatcgttattcatcgcttatacctttgcttatttctgcaattccatacgtttaatgtcgccaactacgaagaggtagcagaccatcgccattagcgctgaacatcccacgaaaaccagtgctgcattgaaggagtgcagttcacttaccaggtagccaatcaccagtggagtgacaatggaggcaacattgccaaagacgttaaagacgccgccgcagaggccaacaatctctttaggcgcggtgtcagaaatcaccggccagcccagcgcaccaaatcctttaccaaagaaagccagcgccatcagcatgaccaccagcgtggtgttgttggtgtagttacataagatgatggtggaagccagcaacattcccagcacaatcggtagcttacgtgccagggtcagggataaaccgcgtttgatcagataatccgagaagacacctcccagcacgccgcccgcaaaaccacacagtgctggaatcgaggcgaccagacccactttcagaatcgacatacctttttcctgcaccagataaatcgggaaccaggtgaggaagaaccaggtgatggtgttgataaaatattgtccgaaaaatacgcccaacatcatgcggttagagagcaattgcttgatgtaatgcagtttgggtccgcttgctgccgcactgcccggctttttgtggtccatatcgaccaccgcgccattttcagagataaacttcagctcttccgcagacatacgtgggtgatctgtcgggttatgaatcaatttgatccacagcgccgtcagcacaaaaccaatcacccccataacggtaaagacgtgctcccagccccaggcgaaagtcagccagccaagcagaggcgaaaagagcgccagcgagaaatattgcgccgagttaaagatggcggaggcagtaccacgttctttcgtcgggaaccaggcggcgacaatacgggcgttcgccgggaatgatggcgcttccgagaagccgagcataaagcgcataaagaacatggagatccctgcccaggccagcgggaacatatcaacaaagccttgcaggaaggtgaatagcgaccagaaaaagaggctgtaggtgtaaacttttttcgagccaaacttatcaagcagccagccgccggggatttgcatcagcaagtaggcccagccaaaagcagaaaagatgtaacccatcgaaaccgcacttaactgcaactcttttgccacttcggtaccagcaatagacagcgttgcacgatcggcgtagttaacggcggtaacaataaaaataatcagtaatattaaatagcgggtntgcacgcctttctttttttcgtcaacggtgtccagaatcattttatttacctcgggtacttatgctgatttttattattatggggaagatgttatttatgagtttcatttatgccgtaacgacaatgaactcgggaattagtataagcagcgcga

SEQ ID NO: 1505 - DNA, 197 bp, Escherichia coli
  Strain O55:H7
atcattgtgcaaatgctaatttaattaatactatttaaatattattttgagcatatgcacataaggttgcgcgctaaagcacagatttgcgctttaccttgccgggcggcattgcaatccctgaaatgattgacattgatcacatttctgcgtttaaactcctgacattcttatttcacccaatgaagtcatttatt

SEQ ID NO: 1506 - DNA, 2940 bp, Escherichia coli
  Strain O55:H7
  modified_base (461)..(461): a, c, g or t
gaccaggtcctcattttaataacctctggctggagaatattgcacaatggccaacatcgaaatcagacaagaaacgccaactgcgttttatataaaagttcacgacacagataatgtggcaattattgttaatgataatggcctgaaagcaggaacgcgttttccggatgggctggaattaattgaacatattccccaggggcataaagtcgcattgctcgacattccggctaatggtgaaattattcgttatggcgaagtgattggttacgccgtgcgtgcaatcccacgcggaagctggatcgacgaatcaatggttgtactgccgaaagcgccgccgttacacacgctgccactggcaaccaaagtcccggaacccttaccgccgctggaaggatacacctttgagggctatcgcaatgccgatggcagcgtgggcaccaaaaacctgctcggcatcnccaccagcgtccactgtgtggcaggcgtggtggactacgtagtaaaaatcattgaacgcgatctgctaccgaaatacccgaacgtcgatggcgtggtggggctgaatcatttgtacggttgtggcgtggcgattaacgcaccggcggcagttgtacctatccgtaccattcacaatatttcgctgaatcctaactttggcggcgaagtaatggtgattggcctgggttgtgaaaagttgcagcctgagcgcctgctgactggaacggatgatgtgcaagctattccagtagaaagcgccagcattgtcagtttgcaggatgaaaagcatgtcggttttcagtccatggtcgaggatattttgcaggtcgccgaacgccatctacaaaaactgaatcaacgtcagcgagaaacctgtccggcttcagaactggttgtcggcatgcagtgcggtggcagcgatgccttttctggcgtaacggcaaacccggcggttgggtatgcgtctgatctactggtgcgctgcggcgcaacggtgatgttctcagaagtcacggaagtgcgtgacgcgatccatctgctgacaccacgcgcagtgaacgaagaggtcggcaaacggctgctggaggagatggagtggcacgataactatctcaatatgggaaaaaccgaccgcagcgccaacccttcgccgggcaacaagaaaggcggtctggcaaatgtagtggagaaagcgctcggctccattgctaaatcgggtaaaagtgcaattgttgaagtgctgtcgcccggtcaacgcccgactaaacgcggattaatttacgccgcgacgccagccagcgattttgtctgtggcacgcaacaggtggcttcgggtatcaccgtgcaagtgtttacgaccggtcgtggtacgccgtacggcctgatggcggtacccgtcattaaaatggcgacccgcaccgagctggcgaaccgctggtttgatttaatggatattaacgcgggcactatcgccaccggcgaagaaaccattgaagaggtgggctggaagttgttccactttattctcgacgtcgccagcgggaagaagaaaaccttctcggatcaatggggactgcataaccagctggcggtgtttaacccagcaccggtgacctgatttcttttggaacgtccctcgcaaaacatggccttagtgccatgtttttattgtttaaagcccccacgtccattaataatgcatttgcattaccttagttcaagcttataatttgagcagaaaacaggctgtaaaaggacagtgaatcatgcccgctaatgctcgctctcacgctgtactgaccactgaatcaaaggtcacgatacgcggacaaacaactatccccgcgccagtgcgtgaggccttaaaactgaagccaggccaggacagcattcattacgaaattctgcctggtgggcaagtatttatgtgccgactgggagatgagcaggaggatcatactatgaatgcatttttgcgttttctggatacagatatccagaacaacccgcaaaaaactcgtccattcaacattcaacaaggaaagaaacttgtcgctggcatggacgtcaacattgatgatgagattggcgacgacgaataatggattttccacaaagggttaatggttgggcgctatatgctcatccctgttttcaggaaacctacgacgctttagttgccgaagtcgagacattaaagggaaaagatcctgaaaattatcagagaaaagctgccacaaagttattggcggtggtccataaagtgattgaggagcatatcacggtcaatccatcatcaccggcattccgtcatggcaagtcgttaggctctgggaaaaataaagactggtcacgggtaaaatttggtgctggtcgctatcgtctcttctttcgttacagtgaaaaagagaaagtcatcattctgggatggatgaacgatgaaaacacgctgcgcacctacggtaaaaaaacagatgcctataccgtattcagcaaaatgttaaaaagaggacatcctcctgccgactgggaaaccctcacccgagagacagaagaaacccattgatggtgttcacaatgcccgccgaacgcattcgtgttgaccagcgggcaccctttctcactccccgaccagaatcacttcaaccccagcctttcgcagcccttccaggctatccgcaggaatgccttcatcaacaatgatcatgtcgatacgttgagtatcaatgatcttatgtaaactggaacgattgaatttactggaatcggtgaccacgatgatccgttccgcaacttcgcacatccggcggtttaaacgggcttcatcttcattatgcgtgctgacgccgcgctccagatcgatcgcatctacaccaagaaacagcatatcgaagtggtaattttgcagcgattgctcagcctgatcgccgtaaaaagatt

SEQ ID NO: 1507 - DNA, 11405 bp, Escherichia coli
  Strain O55:H7
  modified_base (1042)..(1042): a, c, g or t
  modified_base (1489)..(1489): a, c, g or t
  modified_base (2032)..(2032): a, c, g or t
  modified_base (2635)..(2635): a, c, g or t
  modified_base (2727)..(2727): a, c, g or t
  modified_base (3676)..(3676): a, c, g or t
  modified_base (5375)..(5375): a, c, g or t
  modified_base (10401)..(10401): a, c, g or t
  modified_base (10634)..(10634): a, c, g or t
  modified_base (11399)..(11400): a, c, g or t
  modified_base (11403)..(11404): a, c, g or t
cggcgcaaatgcccgccggtcatcagcagctcaacgccttccgcttccagcaacgcattagccacgttcataccgttggtcatcgcaattacgtcagtgtgcttgcgcatcagacgagcaatctcaaaagtggtggtcccggaatcgaggatcacccgatgacctggctgaatcaactcaacggcagctttcgcaacgctgcgtttcattgcggtgttcagcgcgcttttatcttccactgatggctcgactgacggcgttgtgctatcgcagatcaacgcgccaccataggcacgcacagcgatcccctgcttttccagaaacgccagatcgttgcggatcgtcacggtagatacgccatacaatgccgacagatcgttaacctgcacactcccttgctgtcgcagacgctgaatgatctgttctcgtcgctcgctggtgcctgtcactcgcttctcacctgaagcgtcggtattactcatagtaagtcctttcgtaaaactttcgtttcatttcgttttgcctattaacgcctttctattaagcaaatgcaagcccaccttgcccattgacgcaagctactctcgtttcagtaactttcattatgtttcttttgtgaatcagatcagaaaactattatctttcgttttatttttatctcaccatgacgcagtatcaactgaaacaaaacgaaagattaatatcgcagtaatctgaactggagaggaaagtgaaacatctgacagaaatggtgagacagcacaaagcgggcaaaacaaatggaatttatgccgtttgttccgcacatccgctggtgctggaggctgcaatccgctacgccagtgcaaaccaaacgccgttactgattgaagcaacctccaatcaggtagaccagttcggcggttataccggaatgacgcccgccgattttcgcggctttgtttgtcagctcgccgactcgttgaatttcccgcaggatgagttgattctgggtggtgaccatctggggccaaaccgctggcaaaacctgccggccgctcangcaatggccaatgccgatgatttgattaaaagctacgttgcggcaggattcaaaaaaatccaccttgattgcagcatgtcctgtcaggacgatccgattcccttaactgatgacatcgtggctgaacgcgccgcccgtctggcgaaagtggcggaagaaacctgtcttgaacactttggcgaagccgatctggagtatgtcattggtaccgaagtgccggtacctggcggcgcgcatgaaaccttaagcgagctggcggtcaccacgccggatgccgcccgcgccacgctggaagcccatcgtcacgcctttgaaaagcaaggtttgaatgccatctggccacgcatcattgccctggtggttcaacccggcgtcgaattcgatcacaccaacgttattgattatcagcccgccaaagcgaccgccttaagccagatggtcgaaagntacgaaacgctgattttcgaagcgcactctaccgattatcaaacgccgcaatcgctgcgccagctggtgattgaccactttgccattctgaaagttggcccggcgctgaccttcgccctgcgtgaagctctgttctctctggcagcgattgaagaagaactggtgccagcaaaagcctgttctggtctgcgtcaggtgctggaaaacgtgatgctcaaccgcccggaatactggcaaagccactaccacggtgacggcaacgcgcgtcgtctggcgcgtggttatagctactcggatcgcgtgcgctattactggccggacagccagattgatgacgctttcgctcatctggtacgtaatctggcggattcaccaattccgctgccgctgatcagccagtatctgccgctgcagtacgtgaaagttcgctccggcgagctgcagccaacgccacgggaactcattatcaaccatattcaggacatcctggcgcagtaccacacagcctgtgaaggccaataagcaaaacaaagaggaacacgntatgccaaatattgttttaagccggattgatgaacgcttgattcacggtcaggtcggcgttcagtgggtcggatttgcgggggcaaatctggtgctggtcgccaacgatgaggttgccgaagatccggtacaacaaaacctgatggaaatggtactggcagaagggatcgccgtacgtttctggacgctgcaaaaagttatcgacaacattcatcgcgccgccgatcgacagaaaatcctgctggtttgtaaaacacccgccgatttcctgacgctggtgaaaggtggcgttccggtgaatcgcattaacgttggcaatatgcactacgccaatggcaagcaacaaatcgccaaaacggtttctgtggatgcgggcgatatcgcagcatttaacgacctgaaagccgctggggtggaatgcttcgttcagggcgtcccgacagagcctgctgtggacctctttaaattactttgagggattcatcatggaaatcagtctgttgcaggcattcgcgttgggcattatcgcctttatcgctggcctggatatgtttaacggcttaacccatatgcaccgcccagtggtcctcggcccgttagtcnggctggtacttggcgatctgcataccggtattttaaccggcggtacgctggaactggtgtggatggggctggccccgctggcgggcgcacanccgcctaatgtgattatcggtactatcgtcggcacggcgtttgccattactactggcgtgaaacccgatgtcgcagtcggtgtcgccgtacctttcgctgtcgcagtacagatggggattaccttcctgttctcggtgatgtctggcgtgatgtctcgctgcgaccggatggcggagaacgccgatactcgcggcattgaacgcgtaaactatctggcactgctggcactcggcactttctattttctctgcgctttcctgcctatctacttcggcgcggaacatgcaaaaaccatcattgatgtcctgccgcaacgattaatcgacggcctcggcatcgcgggcggcatcatgccagcaatcggttttgccgtgctgctgaaaatcatgatgaaaaacgtctacatcccctacttcatcctgggctttgttgccgcagcctggctcaagttaccggtgctggctattgctgccgccgcgctggcgatggcgctgatcgatctgctgcgtaaatctcctgaaccgactcaacctgcggcacagaaagaggaatttgaagatggcatctaatcaaaccaccctgccgaacgtcagtgaaaacgaagaaacattgctgactggcgtcaatgaaaacgtgtatgaagatcagagcattggcgcggagctgacgaaaaaagatatcaatcgcgtcgcctggcgttccatgctgttacaagcgtcttttaactacgaacgtatgcaggcttccggctggttgtacggtctgctgcctgctctgaaaaagatccacactaataaacgcgacctggcgcgcgccatgaaggggcatatgggtttcttcaatacccatccgtttctggtgacatttgttatcggcattatccttgcgatggagcgttctaagcaggacgttaacagtattcagagcaccaaaattgccgtcggtgcnccgctcggcgggattggcgatgcaatgttctggctaacgctactgccgatttgtggcgggattggagccagtctggcattgcaaggctccattcttggcgcagtcgtctttattgtgctgttcaacgtggtccacctggggctgcgttttggtctggcgcattatgcttaccgcatgggcgtggcggcgattccactcattaaagctaataccaaaaaagtcggccatgctgcgtctatcgttgggatgacggtaatcggtgcgctggtggcaacctatgttcgtttaagcaccacgctggaaatcacagcgggcgacgcagtggttaagttacaggctgatgttatcgacaaactgatgcctgccttcttaccgttggtctacaccctgaccatgttttggttggtacgccgcggctggagtccgctgcgtctgattgcagttaccgtggttctcggcatcgttggtaaattctgccatttcctttaaatacaatgaggtattagatgttaagtattattttgacagggcatggcgggtttgccagcggcatggaaaaagcaatgaagcaaattctcggtgagcaatcgcagtttatcgccatcgattttccggaaacctcaagcaccgcgctgcttacatcgcagcttgaagaggccatcgcccaactggattgtgaagacggcattgtttttctgacggatttgctgggcggcacgccgtttcgcgtagcttcaacgctggcgatgcaaaaaccgggctgtgaagtgatcaccggcaccaatttgcaactgctactggagatggtgctggagcgcgaagggttaagcggtgaagaattccgtgtacaggcgctggagtgtggacatcgtgggctgaccagtctggtggacgagttaggccgctgccatgaagaatgtccggtcgaggaagggatatgacacacgttctgcgcgccagaaggctgctgactgaagagggatggctcgatgaccatcagttgcgtattgctgacggtgtcatcgcagcaatcgaaccgattccagtgagcgtgactgaacgcgatgcggaactgctctgccccgcttacatcgacacccatgtacacggtggtgcgggcgttgatgtaatggatgacgcgccggatgtactcgacaagctggcaatgcacaaggcacgcgaaggtgtcggcagttggttgccgactaccgtaaccgcgccgcttagtaccattcatgcggcgctgaaacgtattgctcaacgttgccaacgcggcggacctggtgcgcaagtgctggggagttatctcgaaggaccgtacttcacgccgcagaataaaggcgcgcatccgccggagttgtttcgcgagcttgaaattgccgagctggatcaattgattgccgtttctcagcacaccttacgcgtggtagcgctggcaccggaaaaagagggggcattgcaggccatccgccatcttaaacagcaaaatgtacgagtgatgctggggcatagcgcggcgacctggcaacaaactcgcgccgcgtttgatgctggtgccgacggcctggtgcattgctataacgggatgacaggtttacatcaccgcgaaccgggaatggttggcgcgggattaacggacaagcgcgcctggctggaactgatagccgatggtcatcatgtgcatccggcggcaatgtcnctgtgttgttgctgtgcgaaagagagaatcgtactgatcaccgacgcgatgcaggcagccgggatgccggatggtcgctatacgttatgtggcgaagaagtgcagatgcacggtggcgttgtccgtaccgcgtccggtgggctggcgggcagtacgctgtctgttgatgcggcagtgcgcaacatggtcgagttgacgggcgtaacgcctgcggaagccattcatatggcgtcgctgcatccggcgcgaatgctgggtgttgatggtgttctgggatcgcttaaaccgggcaaacgcgccagcgtcgttgcgctggatagcgggctgcatgtgcaacaaatctggattcagggtcaattagcttcgttttgatggtttgctccattattgggccttcacttcccccgtaaggcctttctttttctttcgttttgatctgtgcagcggtgtcggatgcgacgctaacgcgtcttatccgacctacagttggtgaccgcaaggccggataaagcgtttgcgccgcatccagcaatcccttttgcttcctttatcttttctttcaacgatcacggatttcgttttatttcctttttctccattgaactttcggtttcttttctatagattttaatcaacgaaagacatcaccaagtgaaatgaaacgaaaggcaagtgaaagcgacaacgcccgacgtcaagttcatcagactaaggattgagttatgccagaaaattacacccctgctgccgccgcaaccggtacatggactgaagaagagatccgccatcagcctcgcgcatggatccgttcgctcaccaacatcgacgcgctacattccgcgcttaataacttccttgaaccgttactgcgcaaagagaatctgcggatcatcctgaccggagccggaacctcggcatttatcggtgacatcatcgcgccgtggctcgccagccataccggtaaaaacttcagcgccgtaccgaccaccgatctggtcactaatccgatggactacctgaacccagcccatccgctgctgttgatctccttcggtcgatccggcaacagcccggaaagcgtcgcagccgtggaactggcaaatcaatttgtaccggaatgctatcacctgccgatcacctgcaacgaagcgggcgctctttaccaaaacgcgatcaacagcgataacgcgtttgccgtgctgatgcccgcagaaacgcacgatcgcggctttgcgatgaccagcagcattaccaccatgatggccagctgcctcgcggttttcgcacctgagacgatcaacagccaaaccttccgcgacgtggcggatcgttgccaggcgatcctgacctcactgggcgatttcagcgaaggtgtgtttggttacgcaccgtggaaacggatcgtttatctcggcagcggtggcttacagggcgcagcacgcgagtcggcgctgaaagtgctggaactgacggcgggtaaactggcggccttttatgattctccaaccggattccgtcatggaccaaaatcgctggtcgataacgaaacactggtggtggtatttgtctccagccacccttacacccgtcagtatgatcttgatctgctggctgaacttcaccgtgacaaccaggcaatgcgtgtaatcgccatcgccgcggaaagcagcgacatcgtcgctgccggtccacatatcatcctgccaccgtcacgtcactttatcgacgttgagcaggcattttgcttcctgatgtacgcccagacgtttgcactgatgcagtcgctgcacatgggcaatacgccggataccccatcagccagtggcaccgttaaccgcgtggtgcaaggcgtaatcattcatccgtggcaggcataagaggatcgcattatgagcattatctccaccaaatatctgttacaggacgcccaggccaatggctacgcggtgcctgcttttaacattcataacgccgagacgatccaggcgatcctcgaagtgtgcagtgaaatgcgatcgccggtgatcctcgccggaacgccggggacctttaaacatatcgcgctggaagagatctacgccctgtgcagcgcctattccacaacctacaacatgccactggcgctgcatctcgaccaccacgaatcgctggatgatattcgccgtaaagtccacgcaggtgtgcgcagtgcgatgatcgacggcagccacttcccgtttgccgagaacgtaaagctggtgaaatcggttgtcgacttctgccactcccaggattgcagcgtggaagcagaactgggccgcctgggcggtgttgaagatgacatgagcgttgacgccgaaagtgcattcctgaccgatccacaagaagctaaacgctttgtcgaactgactggcgtcgacagcctggcggtagcgattggtacggcgcacggcttatacagcaaaacgccgaagattgatttccagcggctggcggaaattcgtgaagtggtggatgttcctctggtgctacatggtgccagcgatgttccggatgaatttgtccgtcgcactattgaacttggcgtcacaaaagtgaacgttgccacagaattaaaaatagccttcgccggcgcggttaaagcctggtttgcggaaaatccgcagggtaatgatcctcgttattatatgcgcgtcggaatggatgcgatgaaagaagttgtcagaaataaaattaatgtctgtggttcagcgaatcgaatttcagcataatcattagttttttatgatttatcccaatgtacttcccgattaatatcggggagtgccttaatggaaaaggagatgactaaaccttaataaatagatcagtacaatatcgcaacaataatatatttaaaaaaattatattattcaactttatggtgaggattacacaatgagcagtccaaatattctcttaacccgtattgataaccgtctggttcacggtcaggttggcgtgacctggacatccaccatcggtgcgaatctgctggtagtcgtggatgatgttgtcgctaacgatgatattcaacagaaattaatgggtattaccgcagaaacctacggctttggcattcgtttctttactatcgaaaaaaccattaacgtcatcggcaaagctgcaccgcatcagaagatcttcctgatttgccgtacgccacaaacggtacgtaaattggtagaaggtggcattgacctgaaagatgtcaacgtcggcaatatgcatttctcggaagggaaaaagcaaatcagcagtaaagtttatgtcgatgaccaggatctcacggacttacgttttattaaacaacgtggcgtgaatgttttcattcaggacgtccctggcgatcaaaaagaacaaatccctgactaaatctaaaatcgccttaatattggtttgaggtaataaaaatgcatgaaataaccctacttcagggattatccctggcggcgttagttttcgttctggggattgatttttggctggaagccttatttttattccgcccgataatcgtttgtaccctaactggcgctattctcggtgatattcagactggcttaattaccggtggtctgacagagttggctttcgccggattaacccctgcaggtggtgttcagccgcccaacccgattatggcgggtctgatgaccaccgtcattgcatggtctacgggcgttgatgccaaaacggcaattggtcttggcctgccgtttagtttgttaatgcagtacgtcattctgttcttctattctgctttctcattatttatgaccaaagccgataaatgcgcgaaagaggcggatacggcagcgttttcccgacttaactggacaacgatgctcatcgtcgcttcagcgtatgcggtgattgctttcctctgtacttacctggcacaaggggcgatgcaggcgctggtgaaagcgatgcccgcttggctgacccacggctttgaagtggctggcggtattctgcctgccgttggttttggcttgctgctgcgcgtgatgttcaaagcacaatatatcccttacctgatcgccggcttcctgtttgtttgctacatccaggtcagcaacctgttgccggttgccgtactgggcgcaggctttgcggtgtatgagtttttcaatgcgaaatcccggcagcaagcgcaaccgcagcccgttgccagtaaaaatgaagaagaggactacagcaatgggatctgaaatcagtaaaaaagatatcacccgtctgggctttcgttcgtcgctgctgcaagcgagctttaactacgaaaggatgcaagcgggcggttttacctgggcgatgttgccgatcctgaaaaagatttataaggatgacaaaccgggcctaagcgcagcgatgaaagataacctcgaatttattaatatccacccgaatctggtcggattcctgatggggttattaatttcgatggaagaaaaaggagaaaaccgcgacaccattaaaggcctcaaagtggcactgtttggcccaatcgccgggattggcgatgcgattttctggtttactttgttgccgattatggcgggaatttgctcatcatttgccagccagggaaacctgctggggccgattctatttttcgccgtttacctgcttatctttttcctgcgcgtcggctggacccacgtcggttattcagtcggcgtgaaggcgatcgataaagtgcgagagaactcgcagatgattgctcgctcggcaaccatcctcgggatcacggtaatcggcgggctgatcgcttcgtatgtgcatattaacgtggtgacatcgtttgccatcgacagtacccacagcgtcgcgctgcaacaggatttcttcgataaagtcttcccgaacattttaccgatggcctacaccctgctgatgtattacttcctgcgggtgaaaaaagcgcatccggtgctgttaatcggcgtgacttttgtgctctctattgtttgttccgcattcggcattttgtaaatggaacgangcactgcgtctggcggtgcctctttacttaaggaatttcatcctgtgcaaacccttcagcaagttgaaaactatacggcgttaagtgaacgtgccagcgaatatttattggccgtgatccgtagcaaaccggatgccgtgatttgcctggcgaccggagccacgccattactgacgtatcattatctggtagaaaaaatccactagcagcaggttgatgtcagccagctcacnttcgtgaagctcgacgaatgggtggatctgccattaacgatgcctggtacctgcgaaactttcctgcaacagcatatcgtgcagccgctggggctacgtgaagaccagctcatcagctttcgctccgaagagataaatgagacagagtgcgaacgggtaacgaacctgattgcgcgcaaaggcggtctggatttatgcgttctcggattggggaaaaacggtcatcttgggctgaacgaaccgggagaaaacctgcaaccggcctgccatatcagtcaacttgatgccagaacacagcaacatgagatgttaaaaaccgcgggtcgccccgtgactcgtgggatcaccttaggcctgaaggatattctcaatgcccgcgaggttttgttactggtgactggcgaaggaaagcaggatgcgacagaacgttttctcacggctaaagtctctacctctatcccggcttcgtttttgtggctgcacagtaactttatttgtttaattaatacctaaccagatgaaaaatttgctcaaaatgtttaaattaacttatgcaacagtcacgcattatattaaataacatttgactgggttgaacataacgccaatagcaaaaggagttatgttcaacaatttaattttagatatacatataacttgttctattaataaaccatctcgtattctgactcgccccctggcgcagcaaagtcatgcacttatactcttttgaatacatagaaaattgatatcaatataatgaanntanna

SEQ ID NO: 1508 - DNA, 53 bp, Escherichia coli
  Strain O55:H7
tgcatataaatataatcttaaagtttagtctatttaatgttcaatgaaatatt

SEQ ID NO: 1509 - DNA, 23073 bp, Escherichia coli
  Strain O55:H7
  modified_base (5352)..(5352): a, c, g or t
  modified_base (5580)..(5580): a, c, g or t
  modified_base (8247)..(8247): a, c, g or t
  modified_base (10288)..(10288): a, c, g or t
  modified_base (10318)..(10318): a, c, g or t
  modified_base (11171)..(11174): a, c, g or t
  modified_base (13259)..(13259): a, c, g or t
  modified_base (14693)..(14693): a, c, g or t
  modified_base (15926)..(15926): a, c, g or t
  modified_base (16616)..(16616): a, c, g or t
  modified_base (18315)..(18315): a, c, g or t
  modified_base (18620)..(18620): a, c, g or t
  modified_base (19758)..(19758): a, c, g or t
  modified_base (21655)..(21655): a, c, g or t
agatgttgaacatatattcacattaaatatgattatgtacttgttacaaggataaggttataaatgaataaagttacaaaaacagctattgcgggcttacttgcgcttttcgcaggtaatgccgctgcaaccgatggtgaaatagtttttgatggcgagattttaaaatccgcttgtgaaatcaatgactctgataagaaaattgaagttgctcttggtcactataatgccgaacagtttcgttctgtaggcgatcgtagcccaaaaattccattcactattcctttagttaactgcccagtgactgggtgggagcacgataacggcaacgttgaagcgtctttccgtttatggctggaaacgcgggataatggtaccgtccctaacttccctaacttggcaaaagtgggctcttttgctggcacagcagcaacaggtgtgggtatccgtattgacgatgcggaaagcggaaaccttatgccactaaatgctatgggcaatgataacacagtttatcagatccctgcggactccgctggaattgtcaatgttgacctcatcgcttactacgtatcaaccgttgaagcatccgaaatcaccccaggggaagcagacgctgtcgttaacgtaacgctggattaccgttaatacgttacggcgttatctgacctttcagataacgcccttttccttcctatttctcgttgtatcaggttgaaaaataactatgtcaaaacgaacattcgcgatgatatttaccttgttgtgtagcttctgtatcggccaggcgcttgcagggggtatcgttttacagcgaacgcgagtgatctatgatgccagccgcaaagaggctgcgttacctgtcgcaaacaaaggcgcagaaacaccttatttactgcaatcatgggtagataatatagatggtacaagccgtgccccatttattataaccccaccgctaattcgtcttgaagctggcgatgattcatcactgcgaattattaaaacagctgataacctgcctgaaaataaagagtcgctgttctacattaatgttcgtgccattccagcaaagaaaaaatcagatgatgttaatgctaacgagttgacgctggtatttaaaacacggatcaaaatgttttatcgccccgcacacctgaagggacgggtaagcgatgcgtggaaatcactggaatttaaacgtagtgatcattcactcaatatatataacccaactgaatattacgtcgtatttgccggactagcagtcgataaagccgatctcacaagcaaaattgaatatatcgcgcccggagaacataaacagttaccacttccagcatctggcggaaagaacgtgaaatgggctgcgatcaatgattatggcggcagttccgggacagaaactcgtccactgcaataacaaatataaaaacacaggtcatcagggaatgccacaacgacaccaccagggacataaacgcacaccgaaacagttggcgctcattatcaaacgctgtttgccgatggtgctcactggcagcggcatgctttgcactaccgctaacgccgaagagtattatttcgaccccattatgctggaaaccacaaaaagtggtatgcaaacaaccgatctgtcacgtttttcaaaaaaatacgcacaactaccaggaacttatcaggttgatatctggctgaataaaaagaaggtttcacagaaaaaaattacatttaccgccaatgcagagcaacttctgcagccacagtttacggtagaacaactacgtgagctgggtattaaggtggatgaaatcccggcgctggctgaaaaagatgacgatagcgtgatcaactcgcttgaacaaatcattcccggtacagctgctgaatttgatttcaatcatcagcgacttaatttgagcattccccaaattgcactgtaccgtgatgcaagaggttacgtctccccttctcgttgggacgatggtataccaacgctgtttaccaactactcgtttacaggttctgataaccgttaccgccagggcaatcgtagccaacgacagtacctaaatatgcaaaatggtgccaattttggcccctggcgattacgtaactattctacgtggacacgcaacgatcaggcgtcaagctggaacactatcagtagttatttacaacgtgatatcaaggcgttgaagtctcagttgcttctgggagaaagcgccaccagcggcagtattttttccagctacaactttactggcgtgcaactcgcttccgacgataatatgttgccaaacagccagcgcggatttgccccaacggtacgcggtatcgcaaacagtagtgcaatcgtgactatcaggcaaaatggttatgtgatctatcaaagcaacgtgccagcgggtgcctttgaaattaacgatctctacccctcttccaacagcggcgatttagaagtcacgattgaagaaagtgacggtacgcaacgtcgctttatccagccttattcttcattacccatgatgcagcgacctgggcatctaaaatatagcgcgaccgctggacgctatcgcgctgatgcaaacagtgatagcaaggaacccgaatttgctgaagccacggcaatatatggtttgaataatacttttacgctgtatggcggcctgctcggttctgaagattattatgcgctggggatcggtatcggcggcacacttggcgcactgggcgcgttgtcgatggatatcaacagagctgacacccaattcgataaccagcactcttttcatggctatcaatggcgtacgcagtacatcaaagatatcccggaaaccaacaccaatatcgctgtcagctactatcgctataccaacgatggctattttagttttgatgaagccaatacccgcaattgggactataacagtcgccaaaaaagtgaaattcaattcaacatcagccagacaatatttgatggggtaagtctgtatgcctccggttcacagcaagactattggggcaataacgagaaaaacaggaatatctctgttggggtttccggccagcaatggggaattggttacagcctgaattatcaatacagccgctacactgatcaaaataatgaccgcgcactctctttgaatctcagtattccgttagaacgctggttaccgcgtagccgggtttcctatcagatgaccagccagaaagatcgcccaacccaacatgaaatgcgtcttgatggctcactgctggatgatggtcgcctgagctatagtctggaacaaagtctggatgacgataacaaccataacagtagcgtgaacgccagttaccgttcaccttatggaaccttcagtgccggatacagttacggtaatgacagtagccaatacaattacggcgttaccggcggcgtggttatccatcctcatggtgtgacgctctcgcaatatctgggcaacgcttttgcgcttattgatgctaacggggcatctggcgtgaggatacaaaactatccggggattgctactgatccctttggctatgcagtggttccttatctcacaacttatcaggaaaaccgtctctcggtagatactacgcagctgcccgataacgtcgatcttgaacaaacaacacagtttgtggtgcccaacagaggtgcaatggtagcggcgcgtttcaacgccaatatcggttatcgcgtacttgttacagtcagcgatcgcaacggtaaaccgttgccctttggcgctcttgccagcaacgatgatacggggcaacaaagtatcgtcgatgagggcggcatactatatctctctgggatatcgagtaaatcacaaagctggactgtacgctggggaaatcaggcagatcaacaatgtcagtttgcttttagtacaccggattcagaaccaacaacctctgtattacaaggcacagcgcagtgccattaaggataaaaaaatgaaaagagcgcctcttataacaggacttttgttgatatccacatcctgcgcttatgcctcctcaggagggtgtggagctgacagcactagcggtgcgacaaattacagcagtgtggttgatgatgttacggtgaaccagacagataacgtgacaggacgggagtttacctctgcaacgctaagtagcactaactggcaatacgcctgttcctgctctgcgggtaaggcagttaaacttgtctatatggtcagccccgtacttaccaccactggacatcagacaggatattacaaactcaatgacagcctggatattaaaaccacattacaggcaaacgacattccaggactcacaaccgactaggttgtctctgttaacacccgattcacacagataaaaagcagcaccgtatattctgctgcaacccaaacgggtgtttgccagggtgacacgtctcgttatggacccgttaatattggtgcaaataccacctttaccctgtatgtcaccaagccatttctcggctcgatgaccattccgaaaacggatattgccgtcattaaaggcgcgtgggtcgatggaatgggaagcccgtctacaggtgacttccatgatttagtcaagttatcgattcagggaaatctcaccgccccacagtcgtgcaaaattaatcagggcgatgttattaaggttaattttggattcatcaatggtcagaagtttaccacccgcaatgccatgccagacggttttactccagtagactttgatatcacttatgactgtggtgatacttcaaagattaaaaactcgttgcaaatgcgcatcgacggtacaactggggtagtagaccagtacaacctggtcgccagacgaagaagttcagacaatgcgcccgatgtcggtattcgtattgaaaatctcggcggcggagttgcaaatattccttttcagaacggtatccttcccgttgatccttccgggcatggcaccgtcaatatgcgcgcctggccagttaatctggtcggtggtgagctggaaacaggaaaatttcagggcacagccaccattaccgtcatcgtgcggtaaaagaagacgttgcgttttgattaacgcaacgcttcggcactcttacccctgctgctccagcgcatacttatacagcgcatttttcttcacgccgtgaatttctgcggccagcgccgccgcttttttcagcggcagttctgcctgtagcagcgccagcgtgcgcagggcatcggcgggtaagtcttcttcctgtgctttatgaccttcgacaatcagcaccatttcgcctttgcgacggttttcatcttcctttacccacgccagcagctcgccaacgggcgngccgtgaatggtttcccaggttttggtcagctcacgcgccagaaccacgtagcgggattcgcctaataccgcaacgatatcttccaggctatctaacagacggtgggtagattcataaaaaatcagcgtgcgcggctccgcttcaatggcttttagcgcatcacggcggccttttgatttggcaggtaaaaagccttcgtaacagaaacggtcagagggtaaacccgnggcgcttaacgcagtgatagcagcacacggtccgggtagcggcaccacacgaatccccgcttcacggcaggtacgcaccagatggtagccaggatcgttaattagcggcgttccggcatcggaaaccagcgcaatgttttgcccctcttgcagcttcgccagcagcgtttcggctttttgttgttcgttatggtcgtgcagcgcaaacaaccgggcattaatcccaaaatgttgcagcaataaaccggtgtgacgagtatcctcggcggcaatcagatcaacggcctgtaatacctctaacgcacgctgggtgatatccgccagattgccgattggcgtcggtacaatgtaaagctggccctgagaattatccgccgattggtgttgtttcattgtgtcgtccgtattgccgatttaatattgagcattgcgtaaaaaaaatatcactggatacattatggtaccctcaacattttctcgtttgaaagccgcgcgttgtctgcctgttgttctggcagccctgattttcgtcggttgtggcacccatactcccgatcagtccactgcttatatgcagggcacggcgcaggctgattctgccttttatcttcagcagatgcagcaaagctctgatgataccaggatcaactggcaattactcgccattcgtgcactggtgaaagaaggtaaaaccgggcaggcggttgagttgtttaaccaactaccgcaagaactgaacgattctcagcgtcgcgagaaaacactgctggcggtagagattaaactggcgcagaaagattttgctggcgcgcaaaacttgctggcgaaaattacacccgccgatttagaacaaaaccagcaagcccgttactggcaggcaaaaatcgatgccagccaggggcgtccttccattgatttactgcgcgcgttaattgctcaggaaccgctgcttggcgcgaaagaaaaacagcagaatattgatgccacctggcaggcgctctcctccatgactcaggaacaggcgaatacgctggtgatcaacgccgacgaaaatattctgcaaggctggctggatctgcagcgcgtctggtttgataaccgtaacgatcccgacatgatgaaagccgggatcgccgactggcagaaacgttatccgaacaatccgggcgcgaaaatgctgccaacgcagttggttaacgtaaaagcgtttaaaccagcctcgaccaacaaaatcgccctgctgttgccactgaatggccaggcagcggtatttggtcgcactattcagcaaggctttgaagcggcgaaaaatatcggcactcagccagtggcggctcaggtagctgccgcacctgccgcagacgtagcagaacaacctcagccgcaaactgcggatggcgttgccagcccggcacaagcctcggttagcgatctgaccggtgatcagcctgcggcccagccggtgcctgtaagcgccccggcgacaagcaccgcagcggtaagcgcacccgcaaatccatccgcagagctgaaaatctacgatacctcatcacaaccacttagccagatcttaagccaggttcagcaggatggcgcgagtattgtggttggtccgttgctgaaaaataacgttgaagagttgctgaagagcaacactccgctgaacgtactagcactgaaccagccggagaatatcgaaaatcgcgtcaatatttgttacttcgcgctttcaccggaagacgaagcgcgcgatgcagcgcgtcatattcgtgaccagggtaaacaagcgccgctggtgctgatcccacgcagttcattgggcgatcgcgtagccaatgcgtttgcgcaagagtggcagaaattgggcggcggcaccgttctgcaacaaaaatttggttccaccagcgaattacgcgcgggtgttaacggcggttctggtattgctttaacgggtaccccgattactcccagagcgacaaccgactccggcatgacgaccaacaatccaacgctgcaaaccacgccaaccgatgaccagttcaccaataatggcggtcgtgtcgatgcggtgtacattgtggcaacgccgggtgaaatcgcttttattaaaccgatgatcgccatgcgtaacggtagccagagcggtgcaacgctgtacgccagctcccgcagtgcgcaagggaccgctggcccggatttccgtctggagatggaaggcttgcagtacagcgaaatcccgatgctggcgggcggtaatctgccgttaatgcagcaggcactcagcgcggtgaataacgattattcactggctcgcatgtatgcgatgggcgtcgatgcctggtcgctggcaaatcatttctcacaaatgcgccaggttcagggttttgaaatcaacggtaataccggaagcctgacggctaacccggattgcgtgattaacaggaagttatcatggctacagtaccaacaaggtcaggtagtccccgccagttaaccaccaaacagaccggcgatgcgtgggaagtacaagcgcgtcgctggctggaaggcaaaggactgcgatttgtcgccgctaacgtgaacgagcgtggcggcgagatcgatctgataatgcgtgaaggccggaccaccgtttttgtcgaggtgcgttaccgccgttctgcgctntatggcggcgcggcagccagtgtgacccgcagcaaacaacacaaattattacagactgcccgcttgtggctcgcgcgtcataatgggagttttgatactgtggattgccggttcgatgtggtagccttcaccgggaatgaggttgagtggattaaggatacctttaatgaccactcataattaaggtttaaggattagcgtgcaagaaagaattaaagcttgcttcactgaaagcattcaaactcaaattgcggcggcagaggcgcttccggatgccatctcccgtgcggccatgacgctggttcagtctctgctcaatggcaacaaaatcctctgttgtggtaatggaacttccgctgccaatgcacagcattttgctgccagcatgatcaaccgtttcgaaacggagcggcccagcttacctgccattgcactaaataccgataatgttgtcttaacggcgattgccaacgatcgcttacatgatgaagtgtatgcaaaacaggtgcgggcgctggggcatgcgggagatgtattgttagccatttccacccgtggcaacagccgcgatatcgtaaaagcagtagaagctgccgttacgcgtgatatgaccattgtggcattgaccggttatgacggcggtgaacttgcaggtttgttagggccacaggatgtggagatccgcatcccttcgcatcgcagtgctcgcattcaggaaatgcatatgctgacggtaaattgcctgtgcgatctgatcgataacacgcttttccctcaccaggatgattaaggagaatacatgaaggcattatcgccaatcgcagtccttatttccgcgctgctgttgcaaggttgtgttgccgctgccgtagtgggtactgctgctgtgggtaccaaagccgcaactgacccacgcagtgtcggcacccaggtggacgatggtaccctggaagtgcgcgtgaacagcgcattgtcgaaagacgaacagattaagaaagaagcgcgcattaatgtaacggcctatcagggcaaagtgctgctggttgggcagtcaccaaacgctgaactttcggctcgcgccaaacagattgctatgggcgtagacggtgccaacgaagtgtataacgagattcgtcagggccagccgattggtctgggcgaagcgtctaacgatacgtggatcaccaccaaagtgcgttcgcagctcttaaccagcgacctggtgaaatcgtccaacgtgaaagtgaccaccgaaaacggtgaagtgttcctgatggggctggtgactgaacgtgaagcgaaagcggcggcagatattgccagccgggtgagcggcgtgaagcgggtaactacggcgtttacgtttattaaatagcagccccttgtaatgcctgatgcgacgcttgccgcgtcttatcaggcctacaacgatgcaaaccgtaggtcggataaggcgtttacgccgcatccgacatgttttccctcaaatcagaataacagcgccagcccgccgacaatcacgcctgacactgccaccatcgcccccgtcagccataaggctttcgccgggaacgctttgcgcagcataatcagtgacggcaaactcaccgccgggagcgtcatcaacaatgccagcgccggagcagttcccatacctgccagcatcatcgtttgtacaatcggaatttctgctgccgtgggaatgacaaacaagcaccctgctaccgccatcgccaccacccacatcaggctgttatcgacagcaccatcggcatgggggaataaccagacgcgagcggcacccaacaccagtactgcaaggatgtaaaccgggatcgtactccagaaaagcgtccatagcgccctgccccagcgactaaaaaatccgccctgtgcttccggtatgtcaatttcgaccggtgcttgcgtttgcggtgtttcacgcacccatttttgcaccagcgtcgcaatcagcaacaccatcaccagcccggccaccagacgaatcgccgcaaaaccccagccgaggacaaaccccatnaacaccagcgtcgccgggtttaacaccggnttgcccatccagaatgccagcgcaccgcccatcgacacctgttggcgacgcattcccgccgcgaccggagccgcacagcaggtacacatcatgcccggcagcgaaaacagcgttcccagcagcgtgccgcgaaagcgcgattgcccaagcgtacgcaacaaccagtcacgcgggatcagcacctgaatcaacgaaccgaggatcacccccagcaccgccgctttccataccgcgaggaaatagatcatcgcgtaatccaacgccgcctgccatggattagcatccgcctgcgcaaggatagatttaccgatactgtgggtttcggcagcagtaaacgctttgccgtagtaaggttgccatttcacataccagagaccggcaatgacaacgagaaagaaaagcgcgggtttccaccactgaatgggcgttgccgcctgagatgaagactgaccagtcatagcattccccaggaataagttatgataattgagcgcgtgaatattacgctcactatcaattcttgggaataattattcagctcttttgcgtaattctgaagagcttaaaatcgtcacaccttcatgctcgggccgcatcgcctctgccagcatgacccgcgccacgtctctcgcatcaatggatttccagttaccgggtaacaaacggaacagcggcgcaaaaagcgtttcgttcatccgctgtttgctacgatcgcccagtaacatcgacgggcgagcaatggtcaatttcggccagttctgggcgattaatgcttcttccatctcccctttgacgcggttatagaaaaacggcgagtgggcattggcacccatagcactgaccaccagcatannnngcgcgcccagtcgccgcccggttaatgcggtatccactaccagcgtgtaatcggcatgaataaacgcctctttgctccccgcttctcgccgcgtggtgccgagacaacaaaacacaatgtcgatgggatcggtgacctgcgccagcgcgtcagtcagttgcggatcatggggattaaataccccgggcatatcgcccaacggacgtcgcgtcggcgcggctatggcgttaactttcggttcgttaatcaacatccgcagcaggtgaccgcccaccagccccgttgcgcctgtaatcagtacctgactcatcttcgctcctttacagaattgtctgccttgcactccacggctcatgcaccaggcttaatagaccatgaggtaattatccccgattgtgggaaattcgcctcatccaatgcaacaacgcggaggaagcatgagtaagaaaattgccgttttaatcactgatgaatttgaggattcagaatttacttcacccgcagacgagttccgtaaagccggacacgaagtgattaccattgaaaaacaagcgggtaaaacggtgaaaggcaaaaaaggagaagccagcgtgaccatcgataaatccatcgatgaagtgacgccagcggagtttgatgccctgttgctaccgggcggtcattcaccggattatctgcgtggcgacaaccgttttgtcacctttacccgtgattttgtgaatagcggcaaacctgttttcgccatctgtcacggtccgcagctgctgatcagcgccgatgtgattcgggggcgcaaactgaccgcggttaaaccgatcattattgatgttaaaaacgcgggcgcggaattttacgatcaggaagtcgtggtcgataaagatcagctggttaccagccggacaccggacgatctgccagcgtttaaccgcgaggcgttacgcctgctcggtgcctgagccgcgtagccaaatcatttttttaccaaagcccagcgtgttgtcggtgaatttgatttcatcgggccggatttcccacaccggggccgacagcattctggcaaccggaaagcgacgattgtacgccttgcgcgcgaggtcgctttcctcaccttccagcctgcggatctcacctttaaactgcacgccgcgaattaacgctaccgttttcggctgaccgtttaccgttccggcaaccgcagcctgcggcccactcatctgcgcgtggcgcgttttttcttccgtcaaaatgtagaaggcgactttctgcacatcaaacagataaaaggcattggcgcaccagagttccccttcctgctgcacacaccaggtgacaacatgttgttttgccagccaacggctgatggcggtgagtgtttccattgctgttctcttttatactgtgggcctgaccttaacatgcgacgcagacgatgacaccctggtttctttacttgatccgtaccgccgacaataagctttataccgggatcaccacggatgtcgaacgccgctatcagcagcaccaaagcggcaaaggggcgaaagcactgcgcgggaaaggagaactgacgctggcgttttctgcgccagtgggcgatcgttcgctggcgttacgggcggaatatcgcgttaagcaactgaccaaacggcaaaaagagcgtctggtagcggaaggcgcagggtttgcagagctgttaagcagtctgcaaaccccggagattaaaagcgattgaaatgctcgtgatactcaaccagaccagttacgccattcaacgcgtcatccgctaaacgatgtacctggaaggcgctttcagtgcccggccagcggcaacgcagatcgtgatgcgccgccagttcaaagccgaaacggctgtatagcgccggatcgcccagagtcaccactgcggcatagccgaactcattaagcgaatcgagtccttcatagaccagttggcgtgccagcccctgtccacggtatttttcatctaccgccagcggtgccatgccgacccattgcaggtcttcgccctgcacatcaaccggactaaatgccacatagccaatgacctgaccttcgtcatctgtngccaccagccccagcgtcagaaagccatcttcacgcagatcgtgaaccagcttcgcttccgcatcactttcgaatgaacgacgcagcagggcatcaatacccggcgcatcaatgggaatttctactcgaattagcatggttcacctaccgatgtctgtttggtttcaggcgcggttttcattcccgcctcaacaaaatccgccagttgcagcagcatcatgcgtaaggctttcggcatttgctccagttcaatggcgtccatcaggtttttcacatacagccccagctccgtatcgccttcaatcaccagccgacgctggaagaagagcgtatccggatcttgtttacgcgccgcaatcatcagcagatcgctggcgtcggcactaaaactcacatcagcttgcgcgttctggctgaccaccagtttgccattcaccaccgaggtaaaccattgcaggtcaatatcacgcacatgaatacttaaccagcggccttcaagaaactccagctcaccatcatccagcgcctggcggaattgccagcttaagacctgctcaagaacctggcgttttagcgcaaatggcgtcagttttaccggtacactcaacagagatggccccaaatgcacaatacgggaacgcagtttatccaacacgagttttactccctgtttcaacaatcatcctattttgccatatcagaaaaataacatagcggtataaatcaacaattccatatgaaattgctgctaccaccaatacaactttaactgccttaaatcaaaaattgtcgcagcaaggttaactaaaatcccagttcgttaacatttttgcgttttgatagcgcaaccttcaggaaaaattatggagctgctctgccctgccggaaatctcccggcgcttaaggcggccatcgaaaacggcgcagatgctgtttatatcgggctaaaagatgataccaatgcccgtcacttcgccggccttaactttaccgagaaaaaattgcaggaagcggtgagttttgtccatcaacatcgccgcaaacttcacatcgcgattaacacttttgcgcatccggacggttacgcccgttggcagcgtgccgtggatatggcggcgcagctgggtgccgacgcgctgatcctcgccgacctcgccatgctagagtacgccgccgagcgttacccgcatattgagcgtcatgtgtcagtgcaggcttcggcgaccaatgaagaggcgattaacttttatcatcgccattttgacgttgctcgcgtggtgctgccgcgcgtgttgtcgattcatcaggtgaaacaactggcacgggtcacacctgtcccgctggaagtctttgctttcggcagcctgtgcattatgtcggaaggtcgttgctatctgtcgtcgtatctgacgggtgagtcgcccaacaccgtgngcgcgtgttctccggcccgtttcgtgcgctggcagcaaacgccgcaggggctggaatcccgcctgaacgaagtgctgatcgaccgttatcaggacggcgaaaacgcaggttatccgacgctatgtaaagggcgttatctggtggacggcgagcgctatcacgcgctggaagaaccaaccagtctcaataccctggaactgctgccggagttaatggcggcgaatattgcttcggtgaaaattgaaggccgccaacgtagcccggcgtatgtcagccaggtggcgaaagtctggcgtcaggctatcgaccgttgtaaggccgatccgcaaaacttcgtaccgcaaagcgcgtggatggagacgctcgggtcgatgtccgaaggcacgcagaccacccttggcgcgtatcaccgtaaatggcagtgagaagagcaatgaaatattccttagggccagtgctgtggtactggccaaaagagacgctggaagatttttatcagcaggccgccaccagcagcgccgacgtgatttatcttggcgaagcggtttgcagcaagcgccgggcaaccaaagttggcgactggctggagatggcaaaatcgctcgccggaagtggtaagcagattgtgctctccacgctggcgctggtgcaggcatcatctgaactgggcgaactgaaacgctatgttgagaacggtgagtttctgattgaagccagcgatctcggcgtggtgaatatgtgcgctgaacgcaaactgccgttcgtcgccggacacgcgctgaactgctataacgcggtgacgctgaaaatattgctcaaacagggcatgatgcgctggtgtatgccggtggagctttcccgcgactggctggtgaatctgcttaatcagtgcgatgagctgggcattcgcaaccagtttgaagttgaagtcctgagctacggtcatctaccgctggcctactccgctcgctgctttaccgcgcgttcggaagaccgcccgaaagatgagtgtgaaacctgctgcattaagtatccgaacgggcgcaacgtgctgtcgcaggaaaaccaacaagtgtttgtactcaatggcattcagaccatgagcggctacgtttacaacctcggtaacgagctggcatccatgcagggcctggttgatgtggtccgcctgtcaccgcagggtactgacactttcgcgatgctcgacgccttccgcgctaatgaaaatggcgntgcaccactgccgttgacggcgaacagcgactgtaacggctactggcggcggctggcaggactggagctgcaagcctaagtaaatagctcactttgttaacaactttaactactctttaatgcagtattaaagattaatcggtaacaaagtgagctgttatgactgataaaaccattgcgttttcgctactcgatctggcccccattcccgaaggttcttcagcgcgagatgcattctcccactctctcgatctcgcccgtctggctgaaaagcgcggctatcatcgctactggctggcagaacaccacaatatgactggcattgccagtgctaccacgtcggtattgattggctatctggcggcgaataccaccacgctgcatctggggtctggcggcgtgatgttgcctaaccactcaccgttggtcattgcagaacagttcggcacgctcaatacactctatccggggcgaatcgatttggggctgggtcgtgctccgggtagtgaccagcgaaccatgatggcgctacgtcgtcatatgagcggggatattgataatttcccccgcgatgtcgcggagctggtggcctggtttgacgcccgcgatcccaatccgcatgtgcgcccggtaccaggctacggcgagcaaatccccgtgtggttgttaggctccagcctttacagcgcncaactggcggcgcagcttggtctgccgtttgcgtttgcctcacacttcgcgccggatatgttgttccaggcgctgcatctttatcgcagcaacttcaaaccgtcggcacgactggaaaaaccatacgcgatggtgtgcatcaatattatcgctgccgacagcaaccgcgacgctgaatttctgtttacctcaatgcagcaagcctttgtgaagctgcgccgtggcgaaaccgggcaactgccgccgccgattcaaaatatggatcagttctggtcaccgtctgagcagtatggcgtgcaacaggcgctgagtatgtcgctggtgggcgataaagcgaaagtgcgtcatggtttgcagtcgatcctgcgcgaaaccgacgccgatgagattatggttaacgggcagattttcgaccaccaggcgcgcctgcattcgtttgagttggcgatggatgttaaggaagagttgttgggatagtgtgtcttaacgcgggaagccttatccgagctggcaacgctgtcccacgtaggcctgataagcgaagcgcatcaggcattgtgtaggcagcagaaatgtcggataaggcccgctgattactgatacaccggcagcaaattaaagctcgataagatatggaccagtgcgttgccaacgccaaataccagaatcagcgtaatcatcggcttgccgccccagacgcggaatttcgggctgccaaagcgtttacgcgatgcgcgggccagcagtgccggaacaattgccgcccagatggtagctgctaaaccagcataaccaatggcgtacaggaatccgttcgggaacagcagaccacccacaacaggaggggcaaaggtcagcaatgccgttttcaagcggcccacagccgagtcgtcgaaaccaaacagatctgccagatagtcaaacaaacccagcgttacgccgaggaacgaactcgctaccgcaaagtttgagaacacaaccagcagcagatccagactacggctgttcagtacgccgcttaacgcctgtaccagcacatcaatattaccgcccttctctgcaatatcgataaactccggacgcgggatgttacccatcgtcgccagcaaccagatggtatacagcgccagcgccatcagcgtaccgtacaccagacatttcacgatggttttcggatctttgccgtaatacttcatcaggcttggcacgttaccgtgataaccaaacgatgccagacagaacggcaaggtcatcaacagatacggtgcataagacgcattgctttcagcgacgttgaacaatgtcgcaggctgcacatgccccagcaggctaccgaaggtgaggaagaaggtaatgactttcgcccccagtacaatcgctgtcatgcgactgacggctttagtgctcaaccacaccacaaacgctaccagcaatgcaaaaccaaaacccgccgcccgtgccgggacgtttagtgacatctctgcgaaggtgtgatgcagaatcgaaccactggcagaaatataggcataggtcaggatatagagcacaaaggcaatggaaatgccgttgaccacgttccagcctttgcccagcaaatctttggtgatggtgtcaaaactcgaaccgattctgtaattcaggttagcttccagaatcatcaagccggaatgcagcatacagaaccaggtaaagatcagcnccgccattgaccagaaaaaccacgccccggacatgaccactggcagagaaaacatccctgcgccaataatggtgccgccgataatcaccacgccgccaagcagcgacggtgacgtttgggtggtggttagtgttgccatgagggcttctctccagtgaaaaatagtgcgactgcgttgttatgtattgcactgtaccagtacgcgagtacaaaagacagaaaaaaagccccgatggttcaaatcggggctgtatatattattttacagactgtgttcgctgttcagcgatgattacgcatcaccnccgaaacgacgacgaccggtagagtcatcacgacgcggagcgcggccttcacgacgttcgccgctaaaacgacgaccatcaccacgaccaccttcacggcgttcaccgctgaagttacgaccaccttcacgacgctcgccactgaaaccacgaccaccgccacgacgctctccgccagtatgcggctgtgcatcgcccagtaattgcatattcatcggcttgttcagaatgcgagtacgtgtaaagtgttgcagcacttcacccggcatacctttcggcagttcgatggtggagtgagaagcaaacagcttaatgttaccgatgtaacggctgctgatgtcgccttcgttagcaatcgcaccaacgatatgacgaacttcaacaccatcatcgcggcccacttcaatacggtacaactgcatgtcaccaacatcacgacgttcacgacgcggacgatcttcacggtcgccacgcggaccacggtcgttacgatcgcgcggaccacggtcatcacggtcacggaattcacgtttcggacgcatcggcgcatctggcggaacaatcagagtacgttcaccctgtgccattttcagcagtgcggcggccagagtttcgagatccagctcttcaccttctgcagtcggctgaattttgctcagcagtgcgcggtattgatccagatcgctgctttccagctgctgctgtactttagcggcgaatttttccagacggcgtttgcccagcagttctgcgttcggcagttctacttccggaatagtcagcttcatagtacgttcaatgttgcgcagcagacgacgctcgcggttctcaacgaacagcagcgcgcggccagcacgacccgcacgaccggtacgaccgatacggtgaacgtaagactcagaatccatcgggatatcgtagttaaccaccaggctgatacgctcaacgtccaggccacgggctgcaacgtcggtcgcaatcaggatgtccagacgaccatctttcaggcgttccagtgtctgctcacgcagcgcctggttcatgtcaccgttcagcgcggcgctgttgtagccgttacgctcaagagcttcagccacttccagagtcgcatttttggtacgaacgaagataatcgccncatcaaaatcttccgcttccaggaaacgtaccagtgcttcgtttttacgcataccccagacagtccaatagctctggctgatgtcaggacgggtagccacgctggactgaatgcgcacttcctgcggctctttcataaagcggcgggtaatgcgacgaatcgcttccggcatggttgcagagaacagagcggtctgatgaccttccgggatctgcgccataatagtttcaacgtcttcgatgaagcccatgcgcagcatttcgtcagcttcatccagaaccagaccgctcagtttagagaggtccagagtgccacgtttcaggtggtccagcagacggcccggagtaccgacaacgatctgcggcccctgacgcagggcgcgtaattgcacgtcataacgctggccgccgtacagggcaaccacatttacgccgcgcatgtgtttagagaaatccgtcattgcttcagcaacctgtaccgccagttcgcgggtcggtgctagcaccagaatctgtggtgctttcagctcaggatcaagattttgcagcagaggtaaagagaatgctgcagtttttccgctccccgtctgggccatacccagtacgtcgcggccattcagcagatgtggaatacactccgcctgaattggagatggtttttcgtaacccagatcgttaagggcttcaaggataggagccttcaggcccagatctgcaaaagtggtttcgaattcagccatgtagtacgtgtgcctcaaaattaatggcggccagtctacataactcatcatgaaattgatcagcaattttcattgaaaagtgtgaaccggctcaaagtaggtgtattaacgaacaacaacgccctcacccgttaaggtgatggcaatcaaaaaagattacgggctgatgtgtacgtcagctattgctggtccgattctgccaggtcatcttggtcctggcccaggagcgataattccaacaatgcgtatcggtgctcaacaaagttatgaacgttgttggcaaccgccagtttgaacagtgccgtggcgctgtccaaatcccccagacttaggtagtacttacctaaatagaagttggtttcactgagatgctcagcgagcgaggtgttatccgttgcgtccgccttgagcctttccattaacgtttgttcgctaatgttgcccaggtagaactcgacaatgttccatccccactgttccttatccgatttttcgaagtgctgtttcaacacttctttagcctgcttctcatcgagcttctgctcggcgagataaagccacagactacggaaaggatcattgggatcgtcttgataaaacgccagcagatcatcttgcgctaacttgtcacgaccgccgtaatataatgcgatcccgcgattcaagtgcgcgtagttgtaagttggatcaagctcaagtacagaatcaaacgcttcataggcagcatcaaaattgcctgcctgcgttaaatatatgcctaagtaattgaatacttcaggcatatccggtcggattgccagcgcttgcgaaaaatcgttacgcgctaatgccctcagaccgagactatcatacaacactccgcgctcatataaaagctgtgcgcgttcgtcatcggttaaagcccgactggcaaggatttgttccatacgtgccagaatcacttcctgctgtaaagtcggttgcaatggtaccgcgaggacttcacttttacgccaggaagtattactgcatcctgcaagcgtaagtgctgtcgcaacgaaacaccagcgcaaaaaaggcttcatttcccactcccgaagaccacggttgaatgaacgtcctgttcccggttgctaacaaggcgtcctgcccggttaaaagccccccgccgcagcgganggcaaatggcaaccttactcgccctgttcagcagccggagcttccggtgctgcagcaggttgagactgctcagtcgcttctttaatgctcagacggatacggccctggcgatcaacttccagaactttcaccggtacttcctgacccatctgcaggtaatcggtcactttctcaacgcgtttgtcagcgatttgagagatgtggaccagaccttctttaccgccgccgatggcaacaaatgcgccgaagtcaacgatacgggtcactttaccagtgtagacgcggcccacttcaatttctgcagtgatctcttcgatacgacgaatagcgtgtttcgctttctcgccatcggtcgctgcgatcttcacagtaccgtcatcttcgatttcgatggtggtgccagtttcttcggtcagggcacggatcacagagccgcctttaccgataacgtctttgatcttgtccgggttgatcttgatggtatggatacgcggagcgaactcagagatatcgccacgtggcgcgttgatcgcctgttccattacacccaggatgtgcagacgcgcacctttagcctggttcagtgcaacctgcatgatctctttggtgataccttcaattttgatatccatctgcagtgcagagataccgtcgcgggaacccgcaactttgaagtccatatcgcccaggtgatcttcgtcgcccaaaatgtcagacagtacaacgtagttgtcgccttctttcaccagacccattgcgatacccgcaacggcagctttgattggcacacctgcgtccatcagcgccagagacgcaccgcacacggaagccatagaagaagaaccgttggattcagtgatttcagacacaacacgtacggtgtacgggaatttgtccatatccggcattactgccagcacgccgcgcttcgccagacgaccgtgaccaatttcacgacgcttcggagaaccgaccatgccggtttcgcctacggagtacggagggaagttgtagtggaacaggaaggtatcggtacgttcgcccatcagttcatcaagaacctgcgcgtcacgagcagtacccagcgttgcggtaaccagcgcctgcgtttcaccacgggtgaacagcgcagaaccgtgagtacgcggcagcacgccagtacgcacatccagaccacggatcatatctttttcacgaccatcgatacgcggttcgcctgccagtacgcggctacgaacaacgtttttctcgatcgcgtgcagaatttcacccagttcgttttcgtccagggtttcgtcttcagcaagcagcgtcgcgatggtttcagatttgatgacatcaacctgcgcataacgctcttgtttgtcggtgatgcggtaagcatcgctcagacgagcttcagccagtgcagcaacgcg

SEQ ID NO: 1510 - DNA, 12720 bp, Escherichia coli
  Strain O55:H7
  modified_base (560)..(560): a, c, g or t
  modified_base (1514)..(1514): a, c, g or t
  modified_base (2304)..(2307): a, c, g or t
  modified_base (2779)..(2780): a, c, g or t
  modified_base (3300)..(3300): a, c, g or t
  modified_base (3796)..(3796): a, c, g or t
  modified_base (4213)..(4213): a, c, g or t
  modified_base (7156)..(7156): a, c, g or t
  modified_base (8136)..(8136): a, c, g or t
  modified_base (10132)..(10132): a, c, g or t
  modified_base (12016)..(12016): a, c, g or t
tcagcgcttcgtttaccggctccggctgccagtcccaacgcggtttaccggcttctttcaccagttcattgatgttctgaataacaacctgctgttgttcatgaccgaacactactgcgcccagcatctggtcttcgctcagcagttcagcttcagattcaaccatcagtacagcggcttcagtacccgcaacaaccagatccagtttgctctctttcagctcgtcctgagtcgggttcagtacgtactggtcattgatgtaacctacacgggcagcaccaatcgggccattgaacggaataccagacagagacagtgctgcggaagcaccaatcatcgcgacgatatccgggttaacctgcgggttaacagaaaccacggtggcgataacctgaacttcgttgacgaagccttccgggaacagcgggcgaatcgggcggtcaatcagacgcgcgatcagggtttcgccttcgcttggacgaccttcacgacggaagaagctacccgggatacgaccagcagcgtaggtacgctcctgatagttaacggtcagtgggaanaagtcctgacctggtttggcttttttctggccaacaacggtaacaaataccgcggtgtcatccatgctaaccataacagcggcagtagcctgacgagccatcatgccggtttccagagtcacggtgtgttggccgtactggaatttacgaacgatcggattaagcaatgtaatatcctttctctttcttagacagtaccttacggcactggtgttaatacccgatcttctgcgcatcctcgcgactaatgacaaccctaacccagctctatgtgggtaaagcctctcattagccgcgcgaacctctgcaacggaagatcattcatagcaacaatacattagtttccagtgaattgctgccgtcagcttgaaaaaaggggccactcaggcccccttttctgaaactcgcaagaattagcgacgcagacccaggcgctcgatgagctgggtgtaacgtgctacgtctttacgtttcaggtagtcgagcagtttacgacgctgagaaaccatgcgcagcagaccacgacggctgtggtgatcttttttgtgctctgcaaagtggccctgcaggtggttgatctgtgcagtcagcagtgctacctgaacttcggtagaaccggtgtcgtttgcgtcacgaccaaactcagaaacgattttagctgttgcttcagtacttagagacattttaaaactccaaagtatatagaatgaaaggacgccgatctctaattcagcgatcccagtgtacgttacgcaaagtgttaaacaatttacgcgacgttaagcggcagtattctactcgtagcgacctgttatcgcaagacggttaacattacgccgggtattcaaccaccagacgacgaggcgcaacgcggccttcatcgtcaatttcgcccataccgataaacttgccgttctcaccttccgtaacgcgaaccagtccttccagcggcgngccagatgtacgaaccgggttaccatttttgaagtaaacagaagacgttaacggaagattcaccaccgggtagtccgaagctggactgtccattggcatcagtaatggatcaagcaactccgcagccggaatatcctgctgttcggcttgttcgaccagttcacgcaggtgctccagggtcaccatccgttcaaccggatatttacttaccgccagacgacgcaggtaaatcacatgcgcgccacagccgagtttttcacccaggtcatcaatgatggtgcggatataagtgccttttgagcagtgaatttccagctccagctcattgccttcatggcgaataaacagcaattcataaacggtaattggacgcgcttcacgcggaacttcaatgccctgacgcgcatattcgtacagttttttgccctggtatttcagtgctgaatacatcgatgggatctgttcgatatcgccacggaaagtatccagtgccgccgccagttgttctgcactaaaggttaccggacgctcttcaacgatttgtccgtcggcgtcagaagtatcggtacgctgtccaagacgcgcaatgacccgatagcgtttgtcggagtccagcagatactgggaaaacttcgtcgcttccccgaggcaaatcggcaacatgccggtcgccagcgggtccagcgcaccggtatgcccggcacgattggcgttatatatacgtttcactttttgcagcgcatcgttgctggacataccctgcggtttatccagcaacaaaacgccgttnnnntcgcgaccgcgacgacgaggacgactcattagtcctccttgctgtcgtccgggttaacacgacgttcttcgtcatgtttgaccacgctggtcaccaggtttgacatacgcatcccttcaaccagagagttgtcgtagaagaaggtcagttccggcacgatacgcaggcgcatcgctttacccagcaggctgcggatgaaaccagaagcttcctgcaacgctttgatgcccgctttaaccgcgtcttcatctttgtcgttgaggaaagtcacatacactttggcatacgccaggtcgcgagacatttcgacaccggaaacggtggtcatcatgcccagacgaggatctttaatttcacgctgcaggatgagagcgatctctttttgcatttcctgcgctacgcgctgcgggcgaccaaattctttcgccataataaattctcctgacaaaaaaggggctgttagccccttttnnaaaattaatttcaggtggaagggctgttcacgttggcctgataagacgcgccagcgtcacatcaggcaatccatgccggatgcggcgtaaacgccttatcccgcatggaaccctaaaaaccttaagcgatggtacgttggatctcgatgatttcgaatacttcgatcacatcgccagtgcggacgtcgttgtagttcttaacgccgataccacattccataccgttacggacttcgttaacgtcatctttgaagcggcgcagggactccagctcgccttcatagataaccacgttgtcacgcagaacgcggatcgggttgtgacgtttaaccacaccttcggtaaccatacagcctgcgatggcaccaaatttcggcgatttgaacacgtcacgaacttccgccagaccgataatctgctgtttcagttccggagacagcataccgctcatcgccgctttcacttcgtcgatcaggttatagatgacggagtagtaacgcagatccaggctttccgcttnaatcactttacgtgcagaggcatcagcacgtacgttgaagccaaccaggatggcgttggacgccgcagccagggtggcgtcggtttcggtgataccacctacgccagaaccgatgatcttcactttaacttcgtcagtagacagtttcagcaaggagtcggagatcgcttcgacagaaccctgtacgtctgccttcaggacgatattcacttcgtgaacttcgccttcggtcatgttggcgaacatgttctcgagtttagatttctgctgacgcgccagtttaacttcgcggaatttaccctgacgatagagtgcaacttcacgcgctttcttctcgtcacgtacaacggtaacttcatcacccgcagccggaacaccggacaagccgaggatttccaccggaatggacggacccgcttccagcacttcctgacccagttcgttacgcatcgcacgaacacgaccgtattcgaagccacacagaacgatatcgccnttgtgcagagtaccttcacgtaccagaacggtagcaaccggaccacgacctttatcgaggaaggattcgataaccgcaccgctcgccatacctttacgtaccgctttcagctccagaacttccgcctgcagcaggatagcgtccagcagttcatcgataccggtacccgctttcgcagatacgtgtacgaactggctttcaccgccccactcttccggcaggatgccgtactgggagagttcgttcttaacgcgatccggatcggcttctggtttatcgatcttgttcactgcaaccaccaccggtacctgcgccgctttcgcgtgctggattgcttcgatggtctgcggcattacgccgtcgtcggcagcaacaaccaggactacgatgtcagttgcctgcgcaccacgtgcacgnattgaagtaaacgcggcgtgccccggggtgtccaggaaggtgatcatgccgttttcagtttcaacgtggtatgcaccaatgtgctgggtaatgccgcccgcttcgccagaggccactttcgttgaacgaatgtagtccagcagagaggttttaccgtggtcaacgtgacccatgatggtcacaaccggagcgcgcggttcagccgcagctcccgtgtcacggtcgctcattaccgcctcttccagctcgttttcacgacgcaggataactttgtggcccatctcttcagcaaccagctgtgcggtttcctgatcgataacctggttgatggttgccattgcgcccagtttcatcatcgctttgatgacctgagagcctttaaccgccatcttgttcgccagttcgccaacggtgatagtttcgccgatcacaacgtcacggttaacggcctgagcaggcttctggaagccttgctgcagcgaagaacctttacgttttccgcccttaccgccacgtactgctgcgcgtgcttcttcacgatcagcttttgattcagcgtgtttgttgcctttcttcggacgcgctgctttcgcgttacgaccacggccacggccgccttcgacttcacgatcgctttcgtcttctgcctggcgagcatgttgagaagtagtgacgtgataatcgctggaatcctcagtcggttccgcgttatcagtccatttgttttcttccgccatacgacgtgcttcttcagcaacgcgacgtgcttcttcttcgagtttacgacgcgcttcttcttcggctttacgcttgagctctgcagcttcctgctcacggcgggctttttcagcctgggcgtttttagtcatatcgtcttgttgattgctcactttgtctttttccgcagcttcacgtttcgcttgttcagcagcttcacgcttagcttgttctgcggcctcacgttcagctttttgttgcgcctcgcgtttagccgattcttctgcctcacgacgggcttgctcttccgcttcacgctgcgcttgctcttccgctgcaaggcgttcagcctcttgcggatcgcgtttcacaaaggtgcgtttcttgcggacttcgatttgtaccgatttgctttttccaccggtaccaggaatgttaagggtgctgcgtgttttacgttgcagcgtcaatttgtccgggcctgaatttttctgattcaggtggtcaatcaaagtctgtttctcttgtgcagacacagagtcgtcagcagacttccggatacctgcatcagcaaattgctgtaccaggcgttccacggaggtctgtcgctctgcggccagcgttttaatcgttacatctgtcatgctgttccttcctgctacagtttattacgcttcgtcaccgaaccagcaaatattacgggcagccataatcagtgctccggctttttcgtcggtcaacccttcgatatcagccagatcatcaatgccctgttcggcgagatcttccagcgtacaaacgccacgggcggccagtttgaatgccaaatcacgatctaccccttcaaggttcagcagatcgtcagccggtttgttatcaccgaggctttcttcctgggcctgtgcaatggtggccagtgcatttttagcacgctcgcgcagtgcttcaacggtcggctcatcaaggccttcgatttccaacagctctttcatcggcacataggccagttcttccagcgtcgagaagccttcctctaccagaacagtcgcgaagtcttcgtcgatgtcgagatatttggtgaaggtgtcgatcgctgcgtgcgcttccgcctgatgcttagcctgcaggtcgtcaacggtcatcacgttgagttcccaaccgctcagctgcgaagccagacgcacgttctgaccgttacggccaatcgcctgcgccaggttaccggcttcaacggcgatatccatggtgtgtttatcttcatccaccacgatagaagcaacgtctgccggtgccattgcgttaatcacaaactgcgccgggttatcatcccacaggacgatatcgatacgctcgccgcccagttcagtagaaaccgcctgaacacgcgcgccacgcatacctacgcaagcacctaccggatcgatacgtttatcgttggttttcaccgcgattttcgcacgagaacccgggtcgcgagccgctgctttaatttcaatcacttcttcgccgatttctggcacttcaatacggaacagttcgatcagcatttccggcttggaacgagtgacgaacagttgcgcgccacgcgcttccgggcgaacggaataaagcacgccacgaacgcggtcgccagggcggaagttttcacgcggcagcatatcttcgcgcaggatcacggcttcagcgttgttgcccagatccagagagatgttgtcgcggtttacttttttcaccacgccggtgatgatttcaccttcgtgttcacggaactgatcaaccaccatcgcacgttcggcttcacgcactttctgcacgataacctgttttgccgtctgggtggtgatacggtcaaaggtaacagactcaatctgatcttcaacgtaatcgcccaggttcaggctttcatcttcataacgtgcggcttcaagggtgatttccttggtcggctgggtgacttcatcaacaactaaccagcgacggaaggtgtcaaaatcaccgcttttgcgatcgatctgtacgcggacgtcgatctcttgttcatattttttctttgttgctgtcgccagcgcgctttccaatgcttcgaaaatcttctcgcgaggtagcgccttttcattggatacggcttcaactacagccaaaatttctttgttcatcgcgggcttttcacctcatccagactattaaaagtggggaaccaggttcgccttctggatattactcagngcgaacacttcatctttaccttcgacggtaactgtgatcatttcaccgtctaccgctttgataacgccctgccatttacgacggttttgtaccgccatacggagaaccagagtcacctcttctccgacaaaacgggcgtagtgttcagccgtgaacagtgggcgatcgagacccggtgaggagacttccaggttataagcaacggtgatgggatcttcaacatccagcacagcacttacctggtggctcacatcagcacaatcatcaacattgatgccatcttcactatcaatatagatgcgcagtgtggatgtgcgaccgcgaataaattcgatgccaaccagttcaaaacccagggcctcaactggcgcagtaatcatctctgttaatttttgctctaatgtggacaagcccacccccaagacataaaaaaagggcctaaagcccagttattctgtagtcagataacaaaaaaccccgataaatcggggctttatataactgaaccctataaccgcaactgcggtctggagcactttccagaaggattttttcaaatcccactacgaaggccgaagtcttcacagtatatttgaaaaaggactctaagggaaagtggttgcgggggccggatttgaaccgacgaccttcgggttatgagcccgacgagctaccaggctgctccaccccgcgcctgaaacgtggcaaattctactcgttttgggtaaaaaatgcaaatactgctgggatttggtgtaccgagacgggacgtaaaatctgcaggcattatagtgatccacgccacattttgtcaacgtttattgctaatcacgtgaatgaatatccagttcactttcatttgttgaatacttttgccttctcctgctctcccttaagcgcattattttacaaaaaacacactaaactcttcctgtctccgataaaagatgattaaatgaaaactcatttattttgcatanaaattcagtgagagcggaaatccaggctcatcatcagttaattaagcagggtgttattttatgacgacgattctcaagcatctcccggtaggtcaacgtattggtatcgctttttccggcggtctggacaccagtgccgcactgctgtggatgcgacaaaagggagcggttccttatgcatatactgcaaacctgggccagccagacgaagaggattatgatgcgatccctcgtcgtgccatggaatacggcgcggagaacgcacgtctgatcgactgccgcaaacaactggtggccgaaggtattgccgctattcagtgtggcgcatttcataacaccaccggcggcctgacctatttcaacacgacgccgctgggccgcgccgtgactggtaccatgctggttgctgcgatgaaagaagatggcgtgaatatctggggtgacggtagcacctataaaggaaacgatatcgaacgtttctatcgttatggtctgctgaccaatgctgaactgcagatttacaaaccgtggcttgatactgactttattgatgaactgggcggtcgtcatgaaatgtctgaatttatgattgcctgcggtttcgactacaaaatgtctgtcgaaaaagcttactccacggactccaacatgcttggtgcaacgcatgaagcgaaggatctggaatacctcaactccagcgtcaaaatcgtcaacccgattatgggcgtgaaattctgggatgagagcgtgaagatcccggcagaagaagtcacagtacgctttgagcaaggtcatccggtggcgttgaacggtaaaacctttagcgacgacgtagaaatgatgctggaagctaaccgcatcggcggtcgtcacggcctgggcatgagcgaccagattgaaaaccgtatcatcgaagcgaaaagccgtggtatttacgaagctccggggatggcactgctgcacattgcgtatgaacgcctgttgaccggtattcacaacgaagacaccattgagcagtatcacgcgcatggtcgtcagttgggccgtctgctgtaccaggggcgttggtttgattcccaggcgctgatgctgcgtgactctctgcaacgctgggttgccagccagatcactggtgaagttaccctggagctgcgccgtgggaacgattattcaatcctgaataccgtctcagagaacctgacctacaagccagagcgtctgacgatggaaaaaggcgactcggtgttctcgccagatgatcgtatcggtcaactgaccatgcgcaacctggatatcaccgatacccgcgagaaacttttcggttatgccaaaactggcctgctttcctcctctgccgcttcaggcgtgccgcagatggagaatctggaaaacaaaggccagtaattcgacatcaaccctgcccttcaggggtggggttaccttgcttatcctctgtaaactcctttctgagcatcacataatcgaaaacatcatggtttgcatccacaacccgtgagtctcctttatagtgtacaatcacttcctcaagcgtttgcggctgttccggctttgttacccccatccacgcattaataaggtaattattgtaagctgtcgaaaagatgttgttttccgttgtgcgatccacaccatccccaagaacggggctataccagataaacatcggaacatgatatgcctgctggctggcctccctgcctccatgaaaatagacgttcttcttcgtagggtcacgttccaggccgtggtcggcaaaatacatgaccgaggcgcggcgatcttttaataattcaaaaacctgacctagcaaactatctgtgtaatgaatggagttgtcatagcaggcatcctgatcgtcctgcggttgaaacacggcgctggattgcggataggcgctacaagccggttcatggcttccatttaaatgaagaacaatcagtttcttttgctgcgtattttgctgtaatgcttgcgntaaatgcggcaacaacaattcatcaaatcctctgacataaactgtttccatggcacgcatggcgatactggtaactgctgtaccattctgccgaaaagcggattgcgagcttagccagaaagtctgaaatcctgcttgattagccatattaataatgttgtcggggtaattatgaatgtcatggctcaaaacagaatcagcagttaaagaaaggggaaccgacagcgcagtgtaaggtgcaccgcttattgcttgattaaacagtttgatctgttttctttgtgcttcgacttgcggtgtcgtagagcgtgtatatccatacaaagacatattgtcgacacgtacagactcccccacaatcaacacgtaggtatcaatacctgtatccctgactgataattgaaaatacggcactgtgtttgcaattgagagtaatctttgatgctctttcgctgctaaagcaaaataattgagattgaaaaacggcgtataggtagcaaatcgcgacgctagtatatatggactgaacgcatttttatttttggcatctttataagcaaattgacaagcggaaaataaacttcccgaaatgacaatcagcaataatattcctgtcactttttttgtcggcaaggaaacatcatattttattattacagccaaaaaaagaagggataaaaaggcaaaagcacatagataagggctatacattcccagcattttggcaacttcatccggatcactctgcagcacactaatcgcaaatccatcattgaaagttgtaccaaaggtacaccatgaatagaggctaatactcatgtctgccgcagtcagtaacacaaatggtgcggcaacaagcaggcgaagcggaagggatgatatacgtttaacaaccaggatggtcagaacgaagaacagcaatcgctgaaccatatgcgctccggaagaggcgactaagttcgtaataccaaaaacaataacactaagatacaacaaccaatgagatttaaaacttctagcaaatttgttgaatactgtcatccagaaatccaagttcacaaccaatataaacaattatcaacaatgtgcaattttatatcagacatgtttttcaactctgatccatatcagaacgaaacactgttagttttttctttttaaatgatgcggccattgcgttctcagtaattaaataacattatcaatgcgtctctaaacattacgcagaacgtagccatcagtagttatactgacaggagcaggatggtttatcgagaagtaaacatatccgtattcgtaccggaactggagttgacacaataaagtgccaattatgtcagcagtagggaaaagtttataacgaaggcgtaccggcaccatcgtttcaaggtaccagctacgagtaaagcaactggacgagatacagatacctgacaaccattcctcagaccaggaccaaaacgaaaaaagacgcttttcagcgtctcttttctggaatttggtaccgaggacgggacttgaacccgtaagccctattgggcactaccacctcaaggtagcgtgtctaccaattccaccacctcggcacggaaactactttttagttcgggatatcgctggtcggcttagccggagcagctggctgagtttgttcggttttcgccggcgcactcaggttttcccattcgctacctttattggtcttgttgctattgatgttacccagcaccagactgatgatgaagaataacgttgccagcaacgccgtcatgcgggtcatgaagttaccagaaccacttgaaccaaacagcgtagcggaagcgcctgctccgaaggaggctcccatatcagcgcctttaccttgctgtagcatgatcagaccancaaggccaattgccacaataaggaaaactaccaaaagagcttcgtacataatcaacctgttccttgcggagttgccgcgtaccaatgcttcaaccaataaagcgggagtttataatctttcccactgaagcgggtgtgaatactaaccaaagcgaatgaccttcgcaagggcaattttatcgcattgtatcaactgcggaaaaaaacagcaaaaccgatgtgttcgccgagaaaaaaggcgacaatcgccgcctttttagccagttatctaacgctttaaacggcttttactgcatcggcgatgcggtgtgcaaattcagtcacctgcgcttcgtcttcgccttccaccatcacgcgaattaacggttcggtgccggatttacgcaacagcacacgtccacggctacccagcgccgcttcaacttctgcagtcaccgctttgactgattcatgctccagcggatcgccgctacctgcggtgtaacgcacgtttaccaggatttgcgggaacattttcatgccgctgcaaaggtcgtgcaggctcatatggttacgcgccatcgccgccagcacctgcaaaccagcaacgatgccgtcaccggtagtggttttatccagcaggatcacatgaccggaattctctgcaccgatacgccagcctttctcctgcattttttccagtacgtagcggtcacccactttcg

SEQ ID NO: 1511 - DNA, 7654 bp, Escherichia coli
  Strain O55:H7
  modified_base (1550)..(1550): a, c, g or t
  modified_base (1566)..(1566): a, c, g or t
  modified_base (2853)..(2853): a, c, g or t
caaatggaattcctaactgtttcagcgccagttcaagccccatgttgctcatcaatgtacccacagcgccaccacgcagctggccctgacgaagaccttcacgcgcgatgatatacatgatctgatcgccatcgactttattgccttcatggtcaaccataatcacgcgatcgccgtcgccgtcgaaggcaataccgagatccgctttttcagccagcacacgagcctggagcgcgcgaacgtcggtagcccccacttcggcattgatgtttacaccgtttggctcacaaccgatagcgataacattcgctcccagttcgcgcagcacgttcggcgcgatgtgataagtcgcaccgtttgcgcaatccaccacaatcttcagttcactgaggctaagttcgttcgggaacgtggctttgcaaaactcgatatagcgacccgcagcatcaacgatacggctggctttacccagttctgccgaatcaacacagctgatctctttttccatttccgcttcgatggcttcttcaactgcatccggcagcttagtaccgtcaatagaaaagaatttaatgccattatcgtagaacgggttatgcgatgcagatatcacaattccggcctctgcgcggaaggtacgcgtcagataagccacggccggtgttggcatcgggccagtgaagagtgcggaaaggcccgcagccgccagccccgcttccagtgctgactccagcatatagccagaaatacgcgtgtctttaccaataataatcttacgggagccgtggcgcgccagcactttacccgcggcccaacccagcttaagcacaaaatcaggtgtgatcggcgcatcccctacacgaccacgaatcccatcggtaccgaaatatttacgattactcatagcgtttgttttcctttgcagacagagtagcttccaccactcgcatcgcttctacggtttctttgacgtcatgaacacgaataatgtgcgcgccttgcattgcggcaatgaccgcacaggccagactaccgctcaggcgctcggacggccccacgttcagcagctgcccaatcatcgattttcgtgacatacccaccaacagcggcaggttgaaatggtgaaattcagccaggcgcgccagtaatgaatagttatgggagagatttttaccgaaaccgaatccggggtcgagcaacaatttctcttttgcgatacccgcctgctcgcaacgtgctatttgctcaataaagtagcgattcacttctgcaaagacatcgtcatacttcggggcttcctgcatggtttttggatttccctgcatatgcatcagacaaaccggtaaaccggtttctgcagccgcctccagagcgccaggttcggaaagggagcggatatcgttaataatgtgagcgccaactttcgctgactcacggatgacttctggtttggatgtatcgaccgagatccagacttcgaagcgttgagcaattgcctcaaccacaggaataacacgttgcaactcttcttcaacgctaacttccgccgnccctggccgcgtggantcgccaccaacgtcaatgatcgtcgcgccagcgttgatcatcagattcgcatgtttcaccgcatctatcagcgagttatgcgtgccaccatccgaaaaggaatcaggcgtgacgttgaggatccccattacgtgaggatggctaaggtccagtgaagtaccctgggcaaagagtttcatgatgttatccctggtatgaattgataagaaaaaaccccggagcacgccccggggttttcggtacaaatacagtcatctgatgcgggaacttacttgtcgcctaactgctctgacatggtgttacccgggttcggcgtacgcggttcatcaaccggacgaggagcctttggactaccattgtcgccagaattgttagaagcgcctggttcttcccagcccgctggcggacgtacatcgcgacgtgccatcaggtcatcaatctgcggtgcgtcgatagtctcatatttcatgagagcatctttcatcgcatgcagaatatccatattgtcggtcagaagctgacgcgcacgattatagttacgctcaatcagtgctttcacttcctggtcgatgatacgtgcagtttcatcggacatatgtttcgctttcgctacgctacggccgaggaacacttcaccttcttcttccgcgtacagcagtggacccaatttctcagagaagccccactgagtcaccatgttacgtgccaggttggtcgcaactttaatatcgttggacgcaccggtagaaacatgttccggcccgtagatgatctcttctgccagacgaccaccgtacagcgtagaaatctggctttccagtttctgacggctggcgctgattgcgtcgccctcaggcaagaagaaagtcacacccagcgcacgaccgcgtgggataatcgtcactttgtgcaccggatcgtgctccggcaccaggcgaccgataatcgcatgacccgcttcgtggtaagccgtcgattctttctgcgcttccgtcatcaccatggagcgacgttccgcacccatcatgattttgtctttcgctttctcgaactcaaccatcgacacaacgcgtttgttgccacgagcagcgaacagtgccgcttcgttcaccaggttcgccaggtcagcaccggagaaaccaggagtaccacgggcaatgattgccgcgtcgatatcgggtgccaatggtacgcgacgcatgtgaaccttcaggatctgctcacgaccgcgaacatctggcaagccaaccacaacctgacggtcgaaacggccaggacgcagcagcnctgggtcgagaacgtccggacggttagtcgcggcgataacgatgataccttcgttaccttcgaagccatccatctcaaccagcatctggttcagagtctgttcacgttcatcgtgaccaccgcccagacctgcgccacgctggcggcctacggcgtcgatttcatcgataaagatgatgcacggtgccgctttcttcgcctgttcgaacatgtcacgaacacgggatgcacccacaccgacgaacatttctacgaagtcagaaccggagatagtaaagaacggaactttcgcttcgcctgcaatcgctttcgccagcagcgttttaccggtacccggaggaccgaccatcaggacgcctttcgggatcttaccgccgagtttctggaagcggctcggctcgcgcagatactcaaccagttcagcaacttcttcttttgcttcgtcgcagcccgcaacgtcagcaaaggtcgttttgatctgatcttccgtcagcatgcgcgctttactcttaccaaacgacatggcacctttgccaccgccgccctgcatttgacgcatgaagaagatccagacaccaatcagcaacagcatcgggaaccaggagatgaagatagaagccagcaggctgggttcttcaggcggttcaccgacaaccttgacgttcttggtcaacaggttatccagtaatttcggatcctgaaccggaatgtaagtggtataacggttactatctttcttggtaacgttgatttcacgtccgttgatacgcgcttcacgaacctggtcgttattgacctcttgtaggaaggtagagtaatccaccttacggccattagactcgctgggcccaaagctctggaatactgacatcagcacaacggcaatgaccagccagagtattaggtttttcgccatgtcactcaagggattaacctcttattacaactgtgttaaaaacagcgtcaggatactctatatccagcatctttcaaactttcgtctgaaatctcccggttagggtttacgcccggtcgctacaatatacacttcccgcgaacgtgcacgagaagagtccggcttacgaactttgaccttcgtaaacagggagcgaatttcccttagatactcatcgaaaccttcgccctggaacaccttcactacaaaactgccacctggcgctaatacatcacgacacatttctagcgccagttccaccagatacatggcacgggggatatccaccgccggtgttccgctcatgtttggtgccatatcggacatgacaacctggactttgctgtcgccaacgcgctccagcagtgctttcatcaccagttcatcacgaaaatcgccctgaagaaagtccacaccaacgataggatccataggtaaaagatcgcaagcgatgatgcggcctttgccgccaatttgggtgaccacatattgtgaccaaccacccggagcagcaccaaggtcgacaaccgtcattcccggtttaaagagtttgtcactttgctgtatttcatcaagtttaaaccaggcacgggaacgtaacccctttttctgtgcctgttgaacatatttatcgctaaagtgttcctgaagccagcggctggagctggcagaacgcttcttacctgtcatttaactttcccatggggataactcatcgtaaccaattgcgtaaatttttacgcgcctatttggtgatatatgggagatggcggtagaatgacccgttttcaatcccaacgtaagcaaaaaatacgatgaatctgagtactaaacaaaaacagcacctgaaaggtctggcacatccgctcaagccagttgttctgcttggcagtaatggtttgaccgaaggggtgctggccgagattgaacaagcgttagagcaccatgaactcatcaaggtgaaaatcgccaccgaagatcgcgaaactaaaaccttgatcgtggaagctatcgtgcgcgaaaccggcgcctgtaatgtacaggtcatcggtaaaacgctggtgctttatcgcccaactaaagaacgtaaaatctcgctgccacgctaagattatcctaaagttacacacatttgctgtgtaaaacgaggggttttccgcaggcaggagagcaaaatgccacgctctgttcgttgataaaaggccgctatgcggcctttttcctttctttacaatacatcaacatcttgagtattgggtaattcttacaggtattccaccttaattacttcaaattctacttcgccgcccggcgttttgatgaccacaacatcatcttcttctttgccgatcaggccacgagcaataggtgagtttacagaaatcaggttttgtttaaagtcagcttcgtcatcgccaacgatgcgataagtctgttcttcgtcagaatcgagattcagcaccgttacggtagcaccaaaaataacgcgcccattgttgggcattttggtgacatcaatcacctgcgcgttcgacagcttggcttcgatgtctttgatacggccttcgcagaagccctgctgttcacgagctgcgtggtattcggcgttttctttcaggtcgccatgctcacgcgcttccgcgatagcagcaatgatttcaggacggcgcacagatttcagaaaatccagctcttcgcgtaatttttcagcgccgcgtaaggtcatcggaatagcttgcatttgttatacctcttgaatattcctgatggggcaagtgttcacccaccccggctgttcggcctgcccggcataactcctcaccgggaccagaagcaaaaaaataccgacccgggtacaagtcccaggtcagctacaattcacattttgatagtcattttaccctgaagttcccgaagggtcatcgtttactttatagggcgttgcgccgtagtatgacggctcgattccaggttgttagcgcgagattatgcgattttccagatttatcatcggattgaccagctgtatagcgttcagtgttcaggccgcaaatgttgatgagtacattactcaactccccgctggtgccaaccttgccctgatggtgcaaaaagtcggcgcgtcggcccccgctattgattaccacagtcagcagatggcgctgcccgccagtacccagaaagtgattactgcgctggcggcgttgattcaactcggccccgattttcgtttcaccacgacgcttgaaaccaaaggcaatgtggaaaacggcgtacttaagggtgacttagtggcgcgatttggtgccgatccgacgttaaaacgtcaagatattcgcaatatggtcgcgactttgaaaaaatctggcgtcaaccaaatcgatggcaatgtgttgatagatacctccattttcgccagccacgataaagcccccggctggccatggaatgacatgacacaatgctttagcgctccgcctgccgtcgccatagttgaccgcaactgtttctccgtctcgctctacagtgccccaaaacctggtgatatggcttttatacgcgtggcatcttattaccccgttacgatgttcagccaggtacgcaccctcccccgtggttctgccgaagcgcaatactgcgaactggatgtggtgccaggcgacctgaaccgctttacgctgacgggatgcctgccacaacgttctgagccgctcccgttggcttttgccgtgcaggatggagccagctatgccggtgcaattctgaaagatgagttaaaacaggcgggtatcacctggagcggaacactgctgcgccagactcaggttaacgaacctggaacggtagttgccagtaaacagtcggccccgctgcacgatctgcttaagattatgctgaaaaagtcggacaacatgatcgccgatacggttttccgcatgataggccatgcgcgcttcaatgtgcctggaacatggcgggccgggtcggacgctgtgcgtcagatcctgcgccagcaagccggtgtcgatattggaaacaccattattgccgatggttcagggctttcgcggcataacctgattgcccccgccaccatgatgcaggtgctgcaatacattgcccaacacgacaatgaacttaactttatctccatgctgccgctagcgggctatgacggctctttgcagtaccgtgcaggtctgcatcaggcgggcgtggatggaaaagtctcagcgaaaaccggttcgttgcagggggtatataacctggcgggattcattaccacagcgagcgggcaacgaatggcgtttgtacaatatctttctggctatgcagtagaaccggcggatcagcgtaatcgccgtattccgttagtgcgttttgaaagccgtttgtataaagatatttatcagaacaattagtcaaaaagaaaccccggcacatggccggggttttgctgattaacgcttgtaaatgaactcaacgccttcttcgtcgtcttcgtcccagtcgtcatcccagtcctcatcatcctcttcagcaatctcttcaagctgctggcgatgataatcatcccacatgaattcgactttctctggctgtttcgcttcttcagcctgcacgaccgggttttcaatgataaaggtcatcacatcccagcagagatctttcacgcccagtccactcgccgcagagatcagataatatttatcttcccagcccagcgcctctgcgatcgctttcgctttctcttcggcttctaccttatccagcagatcgatcttgttgaagactaaccaacgcggtttcgccgccagatcctggctgtatttttccagctcgctg

SEQ ID NO: 1512 - DNA, 18089 bp, Escherichia coli
  Strain O55:H7
  modified_base (1122)..(1122): a, c, g or t
  modified_base (4484)..(4484): a, c, g or t
  modified_base (4489)..(4489): a, c, g or t
  modified_base (10701)..(10702): a, c, g or t
  modified_base (10706)..(10707): a, c, g or t
  modified_base (10709)..(10710): a, c, g or t
  modified_base (15067)..(15067): a, c, g or t
cgttttcaaccggatcggtgccgtcaatcggatcgatatcgatgaggtgcaacaggacgcggcaacgttccaggtgcttcaggaagcgaatgcccagacctgcgccttccgcagcgccttcaatcagtcctggaatatcggcaacaacgaagctcttttcgttgtccattcgtaccacacccagacttggcaccagagtggtaaacggataatccgccactttcggtttagccgccgataccgcacgaataaaggtcgatttacccgcgtttggcatccccaacataccgacgtcagccagcagcatcagctccagcagcagctcacgcttatcgcccggcgtaccgttagttttctgccgtggtgtacggttaactgacgatttgaaacgggtattgcccagaccgtgccagccgcccttagcaaccagcagacgctgaccgtgtttggtcatatcgcccatggtttcaccagtaccctggtcgattacacgcgtacctaccggcactttaattgtgacgtctttaccgcgcttaccggtacagtcgcggcttgcgccattctgaccgcgctctgcacggaaagatttttcaaaacgataatcgataagcgtgttcaggttctcgtcggcttccatccatacgtcaccaccatcaccgccgtcgccgccatccgggccgcctttcggaatatacttttcgcggcggaagctcacgcaaccattaccgccatcacctgcaacgaccagaatcgatgcttcatcaacaaacttcattttattctccgtaaatcattcgcctgcgcggggttgcgataccaccgttgtatgcttacgtaatccgccccaaatacgatgaccaatggcggaatacatcgcgcccgcaaccacgacaaacgcaccgagataacctaaaaggtttaacatcggtctggcgaagaaatcgggccaggccagtgataaaagatctgaaaaaaacagcgtaaacagtggggtgagcgtgatgatcgcgctcacctgcgctgcctgccagcgagccatcgcttccgccagggcgccatatcctaccaaggtattcagtccgcaaaaaattaaacatgcgagctgccagtggctaagctgcnctatcactccaggctttgccagagggaagagcgcaattgtacataaagtgtacagtaaaaacaggatctgcggtgaggccagccgacgcaataaaaccttttgcgccacgccataactcacccaaaccgtcgcagcaccgaccccaaagataactccccaggtgtaatcggttagctttgtaaatatctcgaccagactggtgttaaaaaacatcaccaggccgctcaggagcatcaatgcccctacaacctgagtgctgcgcattttctctttcaggataaatacgctggcaaccatcatgccaactggcgagagttgcccaatcacctgcgaagcggtcggactcaggtattgcaaggatgagctgaacaggatgaagttcccaaacagcccggcggtcgccactgccaacaaaatcaaccagcgtggcttacgaaacacgcgtaatggcggcaacctcttcttcaccgcaagaatggcccccaggccaatactcgccatcaagaaacggtaaaacacgattgtcggaggttccatcacctccagcacctgcttcattgcaattggcaacgccccccagcaaattgctgtggtgagcgccaaaagaatgccaatgcctgcctgctgcttcataccgtattccctgcaaagcgcatttgcggattaacgtcgcaccatgcgcatttttaccggttatcgaatgtaaaaagccccgcaacgtgttgcggggctttcatccgttaccgggacgcgaaaaacttattcagcttcgatgctgataaatttacggtttttcgggcctttaacttcgaatttcactttaccgtctgctttagcaaacagagtgtggtcacgaccgcaacctacgttagcgccagcgtggaatttggtaccacgttgacgaacgatgatgctacccgccagaacggattcgccaccgaaacgcttaacgcccaggcgtttagcttctgaatcgcgaccgttacgtgtggagccgccagcctttttatgtgccatttgaaatctctcctcaggtcttaggcgctgatgccagtaattttcacatcagtgaaccactgacgatggccctgctgcttacgatagtgtttacgacgacgaaacttaacgattttaactttctcgccacgaccgtgagcaacaacttcagctttgattacgccgccatcaacgaaaggaacgccgattttgacttcttcaccgtttgcgatcatcagcacttcagcgaactcaacagtttcgccagttgcgatgtccagcttttccaggcgaacggtctgaccttcgcttactcggtgttgtttaccaccactttggaaaaccgcgtacatataaaactccgcttccgcgcacaccttttcaatgattcagagtgcgctataaatattcacaatagggcgcgaatattacgcaaaacgcacgcctttgacaagtgctacagtcaatacacgaagaaaaaaaacacaacttgtacggtaacgtttatctgtgccattttttcagtacaatcaccctatattcctaaccataaaccctaagttgcctttgttcacagtaaggtaatcggggcgaaaagcccggcttttgcgatgaatttagaaaaaatcaatgagttaaccgcgcaagatatggcgggtgttaatgcggcaatccttgagcagcttaattccgacgtccaactgatcaatcagttaggctattacatcgtcagcggcggcggtaaacgtattcgtccgatgattgctgtactggctgcacgagctgttggctatgagggaaatgcgcatgtcaccattgctgccctgatcgagtttatccacacggcgactctgctgcacgacgacgttgtggatgaatcagatatgcgcaggggtaaagctaccgccaacgccgcatttggcaatgccgccagcgtgctggtaggcgattttatttatacccgcgcgttccagatgatgaccagcctcggttcactcaaagtgctggaagtcatgtcagaagccgtaaacgtcatcgcagaaggtgaagttctgcaactgatgaatgttaacgatccggacatcactgaagaaaactacatgcgcgttatctatagcaaaaccgcgcgtctgtttgaggctgccgcgcagtgttccggaattctggcgggctgtacgccggaggaggagaaaggcctgcaggattatgggcgctatctcggcactgctttccagttgatcgacgatttactcgattacaatgccgatggcgaacagttaggtaaaaacgtcggcgacgatctgaacgaaggtaaaccgacgctgccgctgctgcatgcgatgcatcatggcacaccagaacaggcacagatgatccgtaccgccatcgaacagggtaacggtcgccatcttctggaaccggttctggaagcaatgaacgcttgtggatctcttgaatggacgcgtcagcgcgccgaggaagaagcagacaaagccatcgcagcgttacaggtgctcccggacaccccttggcgagaagcactcatcggcctcgcgcacatcgctgttcaacgcgatcgttaatcccctcccctcatcccgcgcagtgcgcgggatgattccagtaaactccataagaatacctattcagcgtaataatgcactgaaaaaccagtgtatacatctttatatattctgaatattcacactctttacaggaactttttagagcaatcggccatcaggagtatagtgatgctcgacagaagaagtgttctgaatgaaagcgactaacttaaggagtgaggaaagatggaaagtaatttcattgactggcatcccgctgacatcattgcgggtttgcgcaagaagggaacatcaatggcggcggagtctcgcagaaatggtttgagttcctcaacgctggcgaatgcattatcgcgcccatggccgaaaggagagatgattattgcgaaagccctgggaactgacccctgggttatctggccatcacgctaccatgatccgcagacccatgagtttatcgacagaacgcagttgatgcgtagctacactaaaccgaaaaaatgagtggtctggcggtagccccgcgaacggggctgccagctctcagacgattattcgcctttcacacgctcaatatttgcacctaaagcgcgcagtttgtcttcaatgcgttcgtatccacgatcgatgtgataaatacgatcaaccaccgtcgtcccttccgcaatacagccagccagcaccaggcttgctgatgcacgcagatcggttgccataacctgtgcgccagaaagtttttcaacaccgtgacaaataacggtattgctttcgatttcggngtgcncgcccatacggctcagctctggcacatgcataaagcggttttcaaagaccgtttcggtgatgaatccagtcccttctgccaccaggttcaacagcgtgaactgggcctgcatatcggtcgggaatgccggatgcggcgcggtacgtacgttaacagccttcggacgtttgccatgcatatccaggctaatccagtcttcgccgacctcgatgtccgctccagcgtcacgcagtttcgccagcacggcgtcgagagtatctggctgcgtgttacggcagataattttgccgcgagaaatcgccgccgccaccaggaaagtaccggtttcgatacgatccggtagcacgcgatagacaccgccgcctaaacgttccacaccttcgatgacgatacgatcggtgccctgaccgctaattttcgcacccagcgtaatcaggaagttcgcggtatcgacgatttccggttcacgcgctgcgttttcaataatcgtggtgccttccgccagggttgcagcacacatgatggtcaccgttgcgccaacgctgactttatccatcacgatatgtgcgcctttcagacgaccatcgacggaagctttaacgtaaccttcttccagtttgatggtcgcgcctaattgttcgaggccagaaatgtgtagatcaaccggacgcgcaccgatcgtacaaccgccaggtagtgaaacttgcccctgaccaaagcgcgctaccagcggccccagtgcccagatagaagcacgcatggttttaaccagatcgtaaggtgcgcagaatacattaacgtcgcgggcatcaatatgcacagaaccattacgttctactttcgcacccagctggcttagcagcttcattgatgtatcgacgtctttcagtttcgggacgttctggatctctaccggttcttccgccaatagagcggcaaaaaggataggcagagcagcatttttagcgccggaaattgtgacttcgccctggagcttcgttggcccctgaacacgaaatttatccatttagtttgttctcagttaacaattcatatccgctaccggcgaatcgcccatagctcaaaagccgttcagtttgcgatcgcgcgcccactccgcaggggtatacgctttgatcgacacagcatgaatgcggttatccgcaatatattccatcagcggaccatagaccgtctgctgttttttaacccgactcatgccgtcaaacaactcacccacggcaataacctgaaagtggctgccatcgccggaaacgtggacttcctggagggagagagcgttcatcaacacgctctgaatttcattattttccatgggatcttcaatcatcagttaataaaccagcgaaacatcttagagcaaagttgcgctggcataaataagcaaaaagcctcgctgataaatcagacaaggctcgacttgcaggcaggtttgccggacaggcggttaacgccatatccggcctgaaaaaatttaacgaggcagaacatcagcaggcaaattatacaatttcgccagggtatacactttgtcgtttaccccctgaagcgtcacgttgttgccctgctttttcgccagatcgataagatggagcagcagtgccagtccacccgtatccacgcgggacacacggctaagatcgatgcaggtaatccccttcaccgcttcctcacgcatttcccaaagcggtagcagaacgtcctgatccagctctccggataacgccagtgtgtcacccgtctgcatccagctcagtgactcgctcattattttttctcttccagagtgattttctgttgagaaatcgatttcagttgcgcagtcaggccgtcgatacctttggtacgtagcagcgttccccactcgttttgtttggtggtgatcatactgacgccttcagcaatcatgtcgtaagcctgccagttgcccgtctgggagtttttacgccactggaagtccagacgcaccggcgggcggccattcgggtcaataatggtaacgcgaataggcacaatggttttatcacccagcggctgttctggcgcaatctgataggtttgaccgtgatacatcgccagcgcctgaccgtaagcctgcttcaggtactcacggaaagcggcaaagtaagcatcacgttgagctggggtcgcactcttgtaatactggcccagcaccagcgcaccggcgtatttcacctgtacgtatggcagcagttcctgatcaacaatggtacgcagataatccgggttggcccgaatttgcggttgctcattcttcaggcgatcgaacgttttctgcgccgcctcgtccatcagcttatacggattggtctggtctgccgcggttgccgcactcagcggtgcaatcaccagcaaagcgaccatcattaaacgtttaaacatgcgtcggttctcctgaaattatttcgttgtacccacaggttcagtggtttcattattacctggcgcagcagctggcgcatcgccactattcttattgtcatcgcctttactaccgtaaaggaactgaccaatgagatcttccagcaccatcgcagacttggtgtcctgaattgtatcgccatccttcaggatagcagtccccagttccgggtcttcaaaaccgacgtttaatgccagatattgttcccccagcaggccggaagtacgaatgctcagcgaactggtatcaggaatatggttataacgttgttcaatttccagcgttacgcgcggcagataggttttcgggtccagcgtaatatccgccacccggcccacaacaacgccaccaatactgaccggagagcgcgctttcaggccgccaatgttatcgaacgtcgcataaagcgtgtaggtcggttcagtacgtattgacgtcacgttcgccgccttcaggcaaacaaacagcgccgccagcagtgctgctaataaaaagatacccacccaaatttcattttttttcgtttgcatgaactcaattcccaaacatcaatgcggtcagcacaaaatccagccccagaacagccagagacgagtggacaacggtgcgagtggttgcccggctaatcccggcagacgtcgggatggcgtcgtagccgttaaacaacgaaatccacgtcaccgtgatggcgaacaccacgctcttaatcagacagttgaccagatccatacgccagtcgacggcattttgcattgccgaccagaagaacccgctatcaatgcctttccaactgacgccgaccagcgatccgccccagatccccacggcgacgaagataaccgtcaacagtggtaatgaaataaccccagcccagaaacggggagaaataacccgacgcagcggatccaccgccatcatctccatactggagagttgctctgtagcgcgcatcaggccgatttctgcggttagcgccgaaccagcacgcccggcaaacaacaacgcggcaaccaccggccccagttcacgcagtagcgataacgccaccagcatacccagactggtttccgcactataagtggtcagaaccagataaccttgcagccccaacaccattccgatgaacacgccagaaactacaataatcagcatcgacaggacgccgacattatagagctggcgcaccagcagcggcgcatgtttgcgaaattccggtttgccgaccagcgcattgaataacattaacccggcccgcccgaacgttctcagggttttaatccctttatgtccgagcgacgccagcgcatttaacagcatgagtggcttaactccctggtaaaagatcagcgtgataatcgccggcaggatagcggaacggaaccggcccgtcagctatcccgtccagaaactgacgtacgcgcggatcaggattcgcctgcaacgcctgggcactgccatgagcgacaatttttttgtccgccaggatccaggcgtgatccgcaatacttaacacttccggcacatcgtgagaaaccaccacacaagtcacgcccagcgcgctgttcagctcagaaatcagcttcaccagtacgcccatggtgatgggatcttgcccaacaaaaggttcatcaaacatgatgagatccggctccagcgcaatcgcacgcgccagcgctgcacgccgcgccatcccaccggaaagttcagaaggcattagtttagccgctccacgcagccccacggcctccagcttcatcatcaccgtactatgcaacaatggcgcgggaagttgggtatgttcgcgcagtggataggcgacgttgtcaaatacgttcatatcagtgaacaacgccccggactgaaataacatgctcatccgtttgcgcactgtatacaggcgcgaacgagacatcgccggaatattctcaccatcgaaaaggatctcaccatgatctggtgcgatttgcccgccaatcagacggagtagcgtcgttttaccgatgcccgatggccccatgatcgccgtgatcttccctcgcggcacggtcagggaaatattatcgaagatgcagcgattgccacgcgtaaaactgacatcgcgcatatcgactaaattcgccacagactgctccataattcacccttcgtcttgcgttgattttctaagcatggcgctcaatttaaccttgaacccaacatatttacagaatattacccgccgtggttagcgaaagctggcatttgttttactttttagccgcataaagtcaaaattaagaatccgttacggctttctgaaaatcttcagcggaccggcgagtatacctgaagaaaggacgttagatgcttttagctacggcactgttaattgttggtttacttttggtcgtttacagtgccgaccgcctggtttttgccgcgtctattctttgccgaacctttggcatcccgccgctgatcatcggcatgacggtggtcagtattggtacatcgttaccagaaatcatcgtctcgcttgccgcgtctctgcacgaacaacgcgatttagccgttggtacagccctcggctcaaacattatcaatatattgctgatcctcggtctggctgcgctggttcgtccttttaccgtccattccgatgttctacgccgtgaattacccttaatgttgttggtcagcgtggtggccggttccgtactctatgacggacaacttagtcgcagcgatggtatctttctcctctttctggctgtgctatggctgctgttcattgttaaacttgcacgtcaggctgaacgtcaggggactgacagcctgaccagagagcagcttgcagagctgccgcgtgacggcggattgcccgtcgcgtttttatggctcggcattgcgcttatcatcatgccagtggccacgcggatggtggttgataacgccacggtgctggcgaattactttgccatcagcgagttgacgatgggtctgacggcaattgctatcggaaccagcctgccggaactggcaaccgcaatagcgggcgttcgcaaaggtgaaaacgacattgctgtcggaaatatcattggcgcaaacatttttaatattgtcatcgtgttgggtttacccgcgctgataacgccaggagagattgatccactggcgtacagtcgtgactacagcgtgatgttgctggtgagcattatttttgcgttgctgtgctggcggcgctccccgcaaccgggccgtggtgtaggggtattattaactggcggatttatcgtatggctggcgatgttgtactggttatcgccaatactcgttgaataactggaaacgcattatgtcgcacgtagagttacaaccgggttttgactttcagcaagcaggtaaagaagtcctggcgattgaacgtgaatgcctggcggagcttgatcaatacatcaatcagaatttcacgcttgcctgtgaaaagatgttctggtgtaaagggaaagttgtcgtcatggggatggggaaatcggggcacatcgggcgcaaaatggccgcaacgtttgccagcaccggtacaccttcatttttcgtccatcctggtgaagccgcgcatggtgatttaggcatggtcaccccacaggatgtggtgattgctatctctaactcaggtgaatccagcgaaatcactgccttaattccagtgcttaagcgtcttcacgtaccgttaatctgcatcaccggtcgcccggagagcagcatggcnngcgnngnngatgtgcatctgtgtgttaaagtagcgaaagaagcctgtccgttagggctggcaccgaccagcagcaccaccgccacgctggttatgggcgatgccctcgctgtcgcgctgttaaaagcacgcggctttactgctgaagattttgcgctctcacacccaggcggcgcactgggtcgtaaacttctgctgcgcgtaaacgatattatgcatacgggcgatgagatcccgcatgttaagaaaacggccagtctgcgtgacgcattgctggaagttacccgcaaaaatcttggtatgactgtcatttgcgatgacaatatgatgattgaaggcatctttaccgacggtgatttacgccgtgtcttcgatatgggcgtggatgttcgtcagttaagtattgccgatgtgatgacgccggggggaatacgcgtgcgccctggcattctggccgttgaggcactgaacttaatgcagtcccgccatatcacctccgtgatggttgccgatggcgaccatttactcggtgtgttacatatgcatgatttactgcgtgcaggcgtagtgtaaagattcaaggataaacaacaatgagcaaagcaggtgcgtcgcttgcgacctgttacggccctgtcagcgccgacgttatagcaaaagcagagaacattcgtctgctaatcctcgacgttgatggcgtactgtcagatggcctgatttatatgggcaataacggcgaagagctgaaagcgttcaatgttcgtgacggttatggcattcgttgtgcgctcacctctgatattgaagtcgctatcattaccgggcgaaaggctaaactggtagaagatcgttgtgccacattggggatcactcacttgtatcaggggcagtcaaacaaactgatcgcctttagcgatctgctggaaaaattggcgattgccccggaaaatgtggcttatgtcggcgatgatctcatcgattggccggtaatggaaaaagtgggtttaagcgtcgccgtggccgatgcgcatccactgttgatcccgcgcgccgattacgtgacgcgcattgctggcggtcgtggcgcagtgcgagaagtttgcgacttattactcctggcgcagggcaaactggatgaagccaaagggcaatcgatatgagtaaagccagacgttgggttatcattgtgctatcactggcggttctggtgatgatcggtattaatatggccgaaaaagacgataccgcccaggtggtcgtcaacaacaatgatcccacctataaaagcgagcatacggacacgctcgtctataacccagaaggggcgctaagctatcgattgattgctcaacacgttgaatattattccgatcaggccgtttcgtggtttacgcagccggtacttaccacgtttgataaggataaaatcccgacatggtccgtaaaagcagataaagccaagctgaccaatgaccggatgctctatttatatggacacgttgaagtcaacgcacttgtgccggactctcaacttcgcagaatcacgacggataacgcgcagatcaatctggtgacgcaggatgttacctctgaagacctcgtcacgttatacggaacaacatttaactccagcggtctgaaaatgcgcggcaacttacgcagcaagaacgccgagctgattgaaaaggttagaacatcctatgaaattcaaaacaaacaaactcagccttaatcttgtgcttgccagctcacttctggccgccagcattccggcatttgccgtaaccggagacactgatcagccgatacacattgaatcggaccagcaatctcttgatatgcaaggcaacgtggttacctttaccggtaatgtcatcgtcacccagggcaccataaaaattaatgccgacaaagtggtcgttacccgtccgggtggcgaacaaggtaaagaagtgattgacggctacggtaaaccggcaacgttctaccagatgcaggacaacggtaaacccgttgaaggtcacgcttcccagatgcactacgaactggcaaaagattttgtcgttctgacgggtaatgcttatctgcagcaggtcgatagcaacattaagggcgataagatcacttacctggtgaaagagcagaaaatgcaggctttcagcgacaaaggcaagcgtgtaaccaccgttctggtgccgtcgcagctgcaggacaaaaacaacaaaggccagaccccggcacagaagaagggtaattaattcgttatggcaacattaactgcaaagaaccttgcaaaagcctataaaggccgtcgcgtggtagaagacgtcagcctgaccgtcaactccggggaaattgtcggtctgctggggccaaacggtgccggtaagaccaccactttctacatggttgtaggcattgtgccgcgcgatgcgggcaacatcattattgatgatgacgatatcagtctgctgcctctgcatgcacgcgcgcgccgcggtatcggctatctgccacaggaagcctccattttccgtcgcctcagcgtttacgataacctgatggcggtactgcaaattcgtgacgacttgtctgctgaacagcgtgaagaccgcgcgaacgagctgatggaagagtttcacattgagcacctgcgtgacagcatggggcagtcactctccgggggtgaacgtcgccgtgtagaaattgcccgcgcactggctgcgaatccgaaatttattctgctcgacgaaccgtttgccggggttgacccgatctcagttatcgacattaaacgcatcattgagcacctgcgcgacagcggcctgggcgtgctgatcactgaccacaacgtgcgtgaaacactggcggtttgtgaacgcgcttatatcgtcagtcaggggcatttgatcgcccacggcacgcctacagaaatcttacaagacgaacacgttaagcgtgtataccttggggaagacttcagactctgatagggtagaagtttgcgacgttttagcaggagagtacgattctgaacatgaagcaaggtttgcaactcaggcttagccaacaactggcgatgacgccacagctccaacaggcaattcgtctgttgcagttgtcgacgctggaacttcagcaggagctacagcaggcgctggagagtaatccgctgcttgagcaaatcgacactcatgaagaaatcgacacccgcgaaacgcaagacagtgaaacgctggacaccgccgacgcgctcgaacaaaaagagatgccggaagagctgccgctcgatgccagttgggacaccatttacaccgctggtacaccatccggcaccagcggtgactacattgacgacgagctgccggtctatcagggcgaaacgacgcagaccttgcaggattacctgatgtggcaggtcgagctgacaccgttttccgacactgaccgcgctattgctacctctatcgtcgatgccgttgatgacaccggttatctgactgtcccgctggaagatattctcgaaagtatgggcgatgaagagatcgacatcgacgaagttgaagccgtccttaagcggatccaacggtttgatccggtcggtgtggcggcaaaagatctgcgtgactgcctgctgatccaactctcccaattcgataaaaccacgccgtggctggaagaggccagactgatcattagcgatcatctcgatctgttagccaatcacgacttccgcactttaatgcgcgtcacgcgtctgaaagaagatgtgctgaaagaagccgtcaatctgatccagtcgctcgatccgcgccccgggcaatcgatccagactggcgaacctgagtatgtcattccagatgtgctggtgcgtaagcataacggtcactggacggtagaactcaacagtgacagcattccgcgtctgcaaatcaaccagcactacgcctcgatgtgcaataacgcgcgcaatgatggtgacagccagtttatccgcagcaatctgcaagatgccaaatggttgatcaagagtctggaaagccgtaacgatacgctactgcgcgtgagtcgctgtatcgttgaacagcagcaagccttctttgagcaaggcgaagaatatatgaaaccgatggtactggccgatatcgcccaggctgtcgaaatgcatgaatcgacgatatctcgcgtgaccacgcaaaaatacctgcatagtccacgaggcatttttgaactgaagtatttcttttccagtcacgtcaataccgagggcggcggcgaagcttcctccacggcgattcgtgcgctggtgaagaaattaatcgcggcggaaaacccagcgaaaccgttgagcgacagcaagttaacntctgtgctgtcggaacaaggtatcatggtggcacgccgcactgttgcgaagtaccgagagtctttatccattccgccgtcaaaccagcgtaaacagctcgtttgacccaaccgataaggaagacactatgcagctcaacattaccggaaataacgtcgagatcaccgaggcactgcgcgaatttgttacagccaaatttgccaaacttgagcaatattttgaccgaatcaaccaggtctatgttgttctgaaagtggagaaagtcacccacacctcagatgcaacactgcatgtaaacggtggtgaaattcatgccagcgcggaaggtcaggacatgtacgctgccattgatggcttaattgataagctggcacgccagttgaccaaacataaagataaactgaaacaacactaattgtccgggcaattagcatgtgcatggcggcctgttgtgcggcacaacgggccatttgtacggttaatgctccgagcctgttccactgtttgagtgggcaggttcttaggtgaaattatgacaaataatgatacaactctacagcttagcagtgttcttaacagggaatgtacgcgaagccgcgtccactgtcagagcaaaaaacgcgccctggaaatcatcagcgagctggcggcgaaacaacttagcctaccgcctcaggtggtttttgaagctatcctgacgcgggaaaaaatgggcagtaccggtatcggcaatggtattgccattccgcatggcaaactggaagaagatactctgcgtgccgttggcgttttcgttcagctcgaaacgcctatagctttcgatgccatcgacaaccaaccggtggacttactttttgccctgctggtgccggcagaccaaactaaaacgcacctgcatactctgtcgctggtggcgaaacgtctggcggacaaaaccatctgccgccgtttacgcgcagcccagagcgatgaagagctgtatcaaatcattacggataccaaaggtactccggatgaagcgtagttattcggtaatgtctcttttagacgttgtgaggagaaacagtacatggtactgatgatcgtcagcggacgttcaggttcaggtaaatctgtcgccctgcgtgcgctggaagatatgggtttttactgcgtggataaccttcccgtagtgttgttacccgatctggctcgaaccctggccgatcgcgagatttctgccgccgtcagcattgatgttcgtaatatgccggagtcaccagaaatattcgaacaggcgatgagtaacctgcctgacgctttctcaccgcaactactgttcctggatgccgaccgtaataccttaattcgtcgttacagtgacacgcgccgactgcatccgctttccagcaaaaacctgtcgctggaaagtgctatcgacaaagaaagcgatctgctggagcctctgcgttcgcgagcggatctgattgtcgatacctcagaaatgtccgttcacgagctggcagaaatgctgcgtacccgtctgctgggtaaacgtgaacgcgaactgacaatggtctttgagtctttcggcttcaaacacggtatccctatcgatgcagattacgtctttgacgtgcgcttcttgccgaacccgcactgggatccgaaactgcgtccaatgacaggtcttgataagcctgtcgccgcgttcctcgaccgccacacagaagtacacaattttatctaccagacgcgaagctatcttgagctatggttacctatgctggaaaccaacaaccgtagctacttgacggtcgccattggttgtaccggcgggaagcaccgttcggtgtatattgcagagcaactggcagactacttccgctcgcgcggtaaaaacgtccagtcacgccatcgtacgctggaaaaacgtaaaccatgactgtcaagcaaactgttgaaatcacaaacaagctgggcatgcatgcccggcctgcaatgaagctgtttgaattaatgcagggttttgacgctgaagtgctgttacgtaatgacgaaggcaccgaggctgaagccaacagcgttattgcgctgctgatgttggattctgccaaaggacggcagattgaagttgaagcgaccggtccacaggaagaggaagcactggccgccgttatcgccctctttaattctggttttgatgaagattaatcttcatcactttgacatacaactcccttcaaactccccccgacaataagaaaatcacgtactgaaatcgttctcaatcaacgtcaattgtacatttcgtgcgctttttactttcagaagaaccttaagaaaaccttaagaagcattgtttaggtttcgtttaagttaatcgaccatactggagatcgtcagaaaatatttccaggagatggcatgattcgcttatctgaacaaagtcccctgggcaccggaagacatcggaaatgttatgcgcatccggaagatgcccaacgctgtatcaagattgtctaccatcgtggcgatggtggcgataaagagatccgtcgtgagttaaagtactacgcgcatcttggtcgccggttaaaagactggagtggaataccgcgctatcacggtaccgtcgagacggattgcggaaccggttatgtttatgatgtgattgctgattttgacggcaagccctccattacgctgaccgaatttgctgaacaatgccgttacgaagaagacgttgcacaactgcgccaattactgaaacagctgaagcgttatttgcaggataaccgtatcgtgacgatgtcgctgaagccgcagaatatcctctgtcaccgcattagtgagtcagaggttatccccgtcgtctgcgacaacattggtgaaagcacattgattccactggcgacctggtcaaagtggtgttgtctgcgtaagcaagagcggttgtggaaacgatttatcgcccaaccggcgctggctattgccctgcagaaagatctgcaacctcgtgagagcaaaacgctggccctcg

SEQ ID NO: 1513 - DNA, 29990 bp, Escherichia coli
  Strain O55:H7
  modified_base (952)..(953): a, c, g or t
  modified_base (3901)..(3901): a, c, g or t
  modified_base (6242)..(6242): a, c, g or t
  modified_base (6700)..(6700): a, c, g or t
  modified_base (8571)..(8571): a, c, g or t
  modified_base (9411)..(9411): a, c, g or t
  modified_base (10795)..(10795): a, c, g or t
  modified_base (13156)..(13156): a, c, g or t
  modified_base (16830)..(16830): a, c, g or t
  modified_base (17575)..(17575): a, c, g or t
  modified_base (17604)..(17604): a, c, g or t
  modified_base (17973)..(17973): a, c, g or t
  modified_base (18549)..(18552): a, c, g or t
  modified_base (18778)..(18778): a, c, g or t
  modified_base (19532)..(19532): a, c, g or t
  modified_base (24816)..(24816): a, c, g or t
  modified_base (25478)..(25478): a, c, g or t
  modified_base (26498)..(26498): a, c, g or t
  modified_base (26617)..(26617): a, c, g or t
  modified_base (29640)..(29641): a, c, g or t
  modified_base (29947)..(29947): a, c, g or t
gaagcttaatccagctggtgttgttgcataaacggctcaccgcctaactgatacatctgccgtaaaatccacgcctgacggctgcgcacgtagcccgatggcgcggagactttgaaacgaagtggattaggtaatacagctgccagtaaggcagcttccgatcgggtaagtttgctcgcgggtttgtggaaataacgttgtgccgcagcttcgacgccaaacacaccgtcgccaaattcggcgatattcaggtaaaccgtcaggatacgctttttgctccagacagtttctatccccagcgttaatccggcttccagcccttttcgaacccagctacgcccatcccataaaaagagatttttggctgtctgttgagaaatcgttgaagcaccgcgaatacggttttcattgcgctcattgtgcgccagggctttctcaatggaagcgacatcaaagccccagtgctcaggaaatgtctgatcttctgcggcaatcaccgtcagtcccatccacggcgagatttgatccatactgacccagtcagaatgtgccacgtaacgaaaattaccatgcagccaggcgctgacctgtcgctcgaccattaccgcagagaagggaacaggtgcaacgctaaacaacgcgatgcccccgccccagaaaacggcgaggacaaccattaaccgcagaagaaaacggcgaacgaaactaaacaccgttaagcggcttttactcattcagccagaaccagcacgcgggaaaccagcttatcaatgccgctcgccgcttctgcaatgttctgcgccagcatatatgccggggtggtgacaatcttattgtcttcatcaaccacgatatcatcgacaggacacggcacatgctccgcgcccatctcttccagcacttctgcggtatcgatatcagtaccgatggtcaaacgcagcgggaaatcgannattttcggcagcatcgccggggcaatacacataaaaccaagcggttttccggcctgatgcatcgcttgtgccagcgcctttaattcacggtcaacggtgcattcgcgaccaagactggcaaaattgcttaaattctttgccgcgccaaacccccccggcacaatcaacgcatccagttcagcggcatcggcctgggccagaggacggatttcaccgcgcgttattcgtgccgcttcaatcagcacattgcgcgtttccgtcatcgcttcgccagttaaatgattgataacatcaacctgctgcttatccggtgcaaagcagaccgcctgcgcaccgctgcgtgaaatagctaacaacgtcaacaccgcttcatgaatttcagaaccgtcatagacgccgcatccgctcagaattacgccaattttcttcattatgatcatcctttcgcaattgactgaaacacattaatttttttaataaaaatggtaccgcatcacacatttaactgattcatgtaacaaatcatttaagttttgctatcttaactgcgtgcggcctgaaaaacagtgctgtgcccttgtaactcatcataataatttacggcgcagccaagatttccctggtgttggcgcagtattcgcgcaccccggtctagccggggtcattttttagtggcttttgccacccacgctttcagcacttctacgtcgtgacgccactcttctttcatctcttcaatccattcaccgacgttatcttcccaggcgggaaggtcaggagactgaatttgctgacccagctgttgcagatggcgcaaccccactgaccccgccgcacctttaattttatgtccttcctcaacaatgccttttttatcctgcgccgtcagattcgactccagcacgctgacatagcctggcatcatcttctcaaacaccgctaacccgtcggtgatcagcttcggtcctacaagttcgagatactgttccagcatgggaatatcgagcaatgcttctgatttactgttctcttctgtcgtcaccgtactctcctcatcatcctgggtatcccagaatttcttgatcatcgcggttagcgccggaacagaaagcggcttactcagcacatcatccattccagcattgaggtactcttgtttgtctttcagcacgttagcggttaaggccaccagcggcggtaaatcctctcgcggataacgcttcgtcagttcacgagagatatccagcccggtcatatctggcaactgaatatccagcaacaccaggtcgtattcgcccggtttaaacatctccagcgccgccttgccggtcatggcgacatcaacgctgttacctaatttttccagcacagaacgcgcgacaatcacgttcagttcaatgtcttccaccagcagcacattcagcgccggtaaaggcatatcgtcttcatcaaacgcatcatcgacctcttctgctaccgacggtgcgtggatcgtcaacgtaaaggttgaacctttaccctgttcgctggtaaccgtaatatcgccgcccatatttttcgccagacgacgagaaacggccagaccaataccggtgccggtggcaggtttaccgccatgactgtctttcacctggtaatacatggcgaagattttatccagctcatcctgcggaatgccgataccagaatcttccacttcaaaatgcagcatatcgccttcatcgtagcgcacgcgcacggtaacctggccttgctgggtgaatttgacggcgttactgatgaggttccacaggatctgccgtaaacgcgtcccgtcggtaatgacctgatgcggtaatggcagcgtcggctccaggttaaagcgcaatcctttttgttgcgcctgcaatgcggagagattttccagatcggcaaggaagctggtgaaatcaaccggttgattatcaagctggaccttgcgccgttccatcttatccatgtcgataatatcgttaaagatattccccagcgtgacggccgaaacatggatggtcttgagatatttttcctgctcggcggtgagttcggtatccagcagaatgcggctcaggccgacgataccgttcagcggtgtacgcaattcgtggctgatggtggaaataaacgtcgttttgtcgcggctggcgcgttcaagcgcatcctgataccgcttacgctcggtaatgtcgcgaccaaagcccatcaaaccgtgacgtttacccacgcggtcgtagtacggcactttacgaatttcaaagcaggctttgcgtccgtcgggataatccagccactgctcataggtcagtgacacattatgacggaacactttttcatcggtttcaatgactttcgcagcggcttccggtgagtaaacatcagcaggtttcaggtgaaccagttgtttttcgctttttccggtcagcagctccatcgcgcggttacagccggaaaactctttatcttcgttacgataaaaaaccaggtcgggtgaagcatcaaggaaggaacgtaaaaatgaggattgctgctcgagctgaatttgtgtctcttcgcgctctttgatttcaattttcagttggccgaaggtttcctgcagttctgcttccgctttttcacgaacggcaatttcctgatttagctgggcaatattatcttttaactgaacgttgaggctcaaatcgcgctcgcgcatctcctccagtttttgcaccagccgtgacagacgttgtcgtgactcctccagttgctcgacgaccaccgatagaaagtagaccgcccacggcgtaatcagcaaaccaaagaagatagaacgaataacatcaatgctttcgacctgaccatgcagcaccatggttaccgccatttgtaccacaatggcaagaacgacgagggccagcgccagcaacattgagaagcgcaccagacctaanttcatcatcaggtcaacataatactgcgccagcagacgaatttgcttcattagggaattccttcacgacaacctgccccaataatacccaattctgacagttacgttataaattgtgtgagaaatgcggaattcccctcaacgacctactccgttggaggtagccacggacgtcccagcgccgatccctgtacgccatgttcattcagatagcgatccagctcgaccattcccgtccatcgattttcgcaccacagaggagcaagcagcgtcgggcgacgggcgctggcggaaatgcggtggtagatcacttccggtggcgtatggcgaatcatttctccggcagtgagcgtgtaatcctccagttcaataccgttcaaacgccccgcttcccaggctttcgccataatgctgcctttcacaatatgcagcggatgcagctttatgccgtccacgccggtttcaaccactcgctccagcgtttgcaaacattcagcctgcccttcgccaggcaggccgacaattaagtgagaacacaccttcagcccgcgctgacgtgccagctgggttgtacgctgataacaggcaaaatcatggccgcgattaatgcgatgcagggttttgtcgtgggcggtttgtagccccagctccagccacacttcgtagccctggtccttatattcgcaaagcagatccagcaccgcatccggcacgcagtccgggcgagtaccaacacacaaaccgacaatattggcctggctcaccgcctgctgatacatagaacgcagcacctgaacttccgcaaaggtgctggtatacgcctgaaagtaggccagatagcgtttagcgcggttaactaaattcgcctggtgcgccagttgctcggcaatggaacgatgttgctgcgcttcatcggcaaatgaggcaacattacagaatgtgcagccgccacgcccgatggtaccgtcacggttagggcagctaaaaccgccgtgcagcgtcagcttatgcaccttttgcccataacgacgggtgagatcaccaccaaacatattgactaatttctgtaactgcataatctgatagaccgcgccttgaaaagaggccaaagcctgccatttttagctcaattcggcgatgacttggatcaatcgtcccggcctgcttttatcaactgcataaccaatcaaaattaccgaaatttcatgcataatcacataaatcacttttgcttatcttgtgtcagatttttttatctccttatggattttaggcaaaacagtagcatgaaacgtcattaccaattaaggcagtataaaatgctggttttctcgtcagttcaaggcaggataagggttaacacgcctttatgacagtcagaaattggctgtttctctaacgacgccccttttagccttaattagaaaatccattttaatttcagtcaattaataaagaattttgcgctaaagcacatttctgtaccaataagcttgccatttgacctgtatcagctttcccgataagttggaaatccgctggaagctttctggatgagcagcctgctcatcatatttatgcagtaattgagatcccctcttcaccgtattaaccgatgcgaaaaggacaacaagggggcgaatgcgaggcgcgcgtatgacacgcaaaccccgtcgccacgctctttctgtgcccgtgcgcagcggttcggaagtggggttcccgcagagcctgggggaggttcacgatatgttgtacgataaatcccttgagagggataactgtggtttcggcctgatcgcccacatagaaggcgaacctagccacaaggtagtgcgtactgcaatacacgcactggcccgcatgcagcaccgtggcgcgattctcgccgatggtaaaaccggtgacggttgcggcttgctgttacaaaaaccggatcgcttttttcgcatcgttgcgcaggagcgcggctggcgtttagcgaaaaactacgccgtcgggatgctcttcctgaataaagatcctgaactcgccgctgccgcacgccgcatcgttgaagaagagctgcaacgcgaaaccttgtcgattgtgggctggcgtgatgtccccactaacgaaggcgtgctgggtgaaatcgccctctcctctctgccacgcattgagcaaatttttgtgaacgccccggcaggctggcgtccgcgcgatatggagcgccgtctgtttatcgcccgccgccgcattgaaaagcgtctcgaagccgacaaagacttctacgtctgtagcctgtcgaatctggtgaacatctataaaggtctgtgtatgccggcggatctgccgcgctnttatctagatcttgcggacctgcgtctggaatcggccatttgcctgttccaccagcgcttctccactaacaccgtaccgcgctggccgctggcgcaaccgttccgctacctggcgcataacggtgaaatcaacaccatcaccggtaaccgccaatgggcgcgtgcgcgtacttataaattccagacaccgcttatccctgacctgcacgacgccgcaccgttcgtcaacgaaaccggctctgactccagttcgatggataacatgctggaactgctgctggcaggcgggatggatatcatccgcgccatgcgtctattagtaccacccgcctggcagaacaacccggatatggacccggaactgcgtgccttctttgactttaactccatgcatatggagccgtgggatggcccggcgggcatcgtgatgtctgacggtcgttttgctgcctgtaacntcgaccgtaacggtctgcgtccggcgcgctacgtcatcaccaaagataagctcatcacctgcgcctctgaagtcggtatctgggattaccagcctgacgaagtggtcgaaaaaggccgcgtcgggccaggcgaactgatggtaatcgacactcgcagtgggcgtattctgcactcggcagaaaccgatgacgatctgaaaagccgccacccttataaagagtggatggagaaaaacgtccgccgactggtaccgtttgaagatctgcccgatgaagaagtgggtagccgcgaactggacgacgacacgcttgccagctaccagaaacagtttaactacagcgcggaagagctggactccgtaattcgcgtactgggcgaaaacggtcaggaagcggtcggttcgatgggcgatgataccccattcgccgtgctctccagtcagccgcgcattatttacgactacttccgccagcagtttgcccaggtgactaacccgccaatcgacccgctgcgtgaagcgcatgttatgtcgctcgccaccagtatcggtcgtgaaatgaacgtcttttgcgaagcagagggccaggcgcaccgtttaagctttaaatcgccgattctgctctactccgatttcaaacagctcacgacgatgaaagaggagcactaccgcgcagatacgctggatatcacctttgacgtcaccaaaaccacgctcgaagcgacggtcaaagagctgtgcgacaaagccgaaaaaatggtacgtagcggcaccgtgctgctggtgctctccgaccggaatatcgctaaagatcgcctgccggttccggctccaatggcggttggcgcgatccagacccgtctggtcgatcaaagcctgcgttgcgatgccaacatcatcgtcgaaaccgccagcgcccgcgatccgcaccacttcgccgtgttgctgggtttcggcgcgacggctatttatccgtaccttgcctatgaaacgctgggccgcctggtagacacccacgcgattgccaaagattatcgtaccgtgatgctcaactaccgtaacggcatcaacaaaggcttgtacaaaatcatgtccaaaatgggcatctccaccatcgcctcttaccgctgctcgaaactgtttgaagcggtcggtctgcacaatgatgtagtgggcctgtgcttccagggggcggtcagccgcattgggggggcgagctttgaagacttccagcaggatctgctgaatctctcgaaacgagcctggctggcgcgcaagcccatcagccagggcggcctgctgaaatacgtccacggcggcgaataccacgcctacaacccggacgtggtgcgcacgctgcaacaggcggtacagagcggcgagtatagcgactatcaggaatacgcgaagctggttaatgagcgtccggcaaccacgctgcgcgatctgctggcaattacgccgggtgaaaacgcggtcaacattgccgatgttgaaccggcaagcgaactgtttaaacgcttcgataccgcggcgatgtctatcggcgcgttaagcccggaagcccacgaggcgctggcggaagcgatgaacagcatcggcggaaactcgaactccggtgaaggtggtgaagacccggcgcgctacggcaccaacaaagtgtcgcgcatcaagcaggtggcttccggtcgctttggggttactccggcgtatctggtcaatgccgacgtcattcagattaaagtcgcccagggcgcgaagccgggcgaaggcggtcagttgccgggcgacaaagtcactccttacattgccaaactgcgctattcggtgccgggcgtgacgctgatctccccgccgccgcaccacgatatntactctatcgaagacttagcgcagctcattttcgacctcaagcaggttaacccgaaagcgatgatctccgtgaagctggtttccgaaccgggcgttggcaccatcgccaccggtgtggcgaaagcttatgccgatttaatcaccatcgcaggctatgacggcggcaccggcgcaagtccgctttcatcggtgaaatacgcaggctgtccgtgggagctgggacttgttgaaacacaacaggcgctggttgccaacggcttgcgtcataaaatccgtttgcaggtcgatggcggcctgaaaacgggtgtcgatatcatcaaagcggcgattctcggcgcagaaagcttcggcttcggcactggcccaatggtcgcgctcggctgtaaatatctgcgtatttgccacctgaacaactgcgcaacgggtgtggcaactcaggatgacaaactgcgtaagaatcactatcacggcctgccgttcaaggtgacgaattactttgagtttatcgcccgtgaaacccgcgagctgatggcacagcttggcgtaacacgtctggtggatctgattggtcgcaccgacctgctgaaagagctggacggtttcaccgccaaacagcagaaactggcgctgtcgaagctgctggagaccgccgaaccgcatccaggtaaggcactctactgcaccgaaaccaacccgccgtttgataacggcctgctgaacgcgcagttgctgcaacaggcgaaaccgtttgtcgatgagcgccagagcaaaaccttctggttcgatatccgcaacaccgaccgctctgtcggcgcgtcgctttcaggctatatcgcccanacgcacggcgatcaggggctggcagccgatccgattaaagcgtacttcaacggcaccgcaggccagagcttcggcgtgtggaacgcgggcggcgtggaactgtacctgaccggtgatgccaacgactatgtcggtaaaggcatggcgggcggcttaatcgccattcgtcctccggttggttccgccttccgcagccatgaagcaagtattatcggcaacacctgcctgtatggagcgacgggtggtcgtctgtatgccgcaggccgcgcgggtgaacgtttcggcgtgcgtaactccggtgcaatcaccgtggtagaaggcattggcgacaacggctgtgaatatatgacgggcggtatcgtctgtattctgggtaaaaccggcgttaacttcggtgcgggtatgaccggcggcttcgcttacgttctcgatgaaagcggcgatttccgcaaacgcgttaacccggaactggtggaagtattaagcgttgacgatttggcgatccatgaagagcatctgcgtggtcttatcaccgagcatgtgcagcataccggttcccagcgtggtgaagagattctggcgaactggtcaaccttcgccactaaatttgcgctggttaaaccgaagtccagtgatgtcaaagcactgctgggtcatcgtagtcgtagcgcagcagagttgcgcgtgcaggcgcagtaaggggtagcaacaatgagtcagaatgtttatcaatttatcgacctgcagcgcgttgatccgccaaagaaaccgctgaagatccgcaaaattgagtttgttgaaatttacgagccgttttccgaaggccaggccaaagcgcaggctgaccgctgcctgtcgtgcggcaacccatactgcgagtggaaatgcccggtacacaactacatcccgaactggctgaagctcgccaacgaggggcgtatttttgaagcggcagaactgtcgcaccagaccaacactctgccggaagtatgcggacgtgtctgcccgcaagaccgtctgtgcgaaggttcctgcaccctgaacgatgagtttggcgcggtgaccatcggcaacattgagcgttatatcaatgataaagcgttcgaaatgggctggcgtccggatatgtccggcgtgaaacagaccggtaaaaaagtggcgattatcggcgcaggtccggcaggtctggcgtgtgcagatgtcctgacgcgcaacggcgtacaagcggtcgtcttcgaccgtcacccggaaattggcggcttgctgaccttcggtattccggctttcaaactggaaaaagaggtaatgacgcgccgccgtgaaatcttcaccggcatgggtattgaattcaaactcaataccgaagtgggccgcgacgtacagntggacgatctgctgagtgattacgatgccgtgttccttggcgtcgggacttatcagtcaatgcgcggcgggctggaaaacgaagacgccgatggcgtgtacgcagcgctgccgttccttatcgccaacaccaaacagttaatgggctttggcgaaactcgtgaagaaccgttcgtcagcatggaaggcaaacgcgtggtagtacttggcggtggcgataccgcaatggactgcgtgcgcacgtctgtacgccagggggcaaagcacgttacctgtgcctatcgtcgtgatgaagagaacatgccgggttcccgccgcgaagtgaaaaacgcgcgggaagaaggtgtagagttcaaattcaatgtccagccactgggaattgaagtgaacggtaacggcaaagtcagcggcgtaaaaatggtgcgtactgaaatgggcgaaccggatgccaaaggccgtcgccgcgcggagatcgtggcaggttccgaacatatcgttccagcagatgcggtgatcatggcgtttggtttccgtccacacagcatggaatggctggcaaaacacagcgtcgagctggattcgcaaggccgcatcatcgccccggaaggcagcgacaacgctttccagaccagcaacccgaaaatctttgctggyggcgatatcgtccgtggttccgatctggtcgttaccgctattgccgaaggtcgtaaggcggcagacggcattatgaactggctggaagtttaagctctgtcccagcgccgcctcctcagaaaagagtcggcgctgaaattctcctttcgttctggaaagcgcctcgcataatctgaagaaaaccaatgtaatacgcacatctggattgttaccggcagatgcccggcgtatagctgattccattattcaacactgcgccatataaagggaaagataatggaatcgctctcagagagaacctcaacaggctaccagcaaatccacgacggtattattcacctggtcgatagcgcccggacggaaacggtacgtagcgttaacgcgctgatgaccgcgacatactgggaaattggccgacgaattgtcgaatttgaacaaggtggcgaggccagggctgcgtatggtgcgcagctaatcaagcgactatcaaaggatttaagtctaaggtataagcgtgggttctctgcaaaaaacttacgccaaatgaggcttttttacctcttttttcaacatgttgaaattcgccagacagtgtctggcgaattaacaccattgccctggtccacttacgtccgtttactttccgttaaaaacgctgacacccgcagcttttatgaaaaagagacgctccgctgtggctggtctgttcgccagctagaacggcaaattgcgacccaattttatgagcgaacactgctgtcacatgacaaatcagccatgctgcaacaacacgctcctgccgagacgcatattcttccgcaacaggcgatacgcgatccctttgtgctcgaatttctggaattgaaagatgaatactcagaatccgattttgaggaggcgctgatcaaccacctgatggatttcatgctggaacttggggatgattttgcctttgttggtcggcagcgaaggttacgcattgatgacaactggtttcgtgtcgatctgctgtttttccaccgccgtttacgctgcctgctaatcgtcgatctaaaagtgggcaaattcagctatagcgatgccggacagatgaatatgtatctcaactacgccaaagagcactggacgctaccggatgaaaatccgcccatcggtctggttctctgtgcagagaaaggagtcggagaagcgcattatgcactggctggtttgcctaacaccgttctggcgagtgaatataagatgcaactacctgatgaaaaacgactcgcggatgaactcgttcgaacacaggcggtgctagaagaaggctatagactccgttaatttcagcggtttcgaattctgcagacactgtctgcagaatctttaaaacgaactaagttttaagccattaaatcagccttaaccttcaccaccacctttttaatctcaccaggttcgccgacaacgcatcctggtttatgcggttctcccggcataaacacggcgaacattcccggttttaagttgatggtttgctcgttttcaatggcgctgcaaagctggtaatcatcttcatggtggaactcttcacactggcgcgcagtgcctgccgtgccaaacagaatccgttcctcaccttttaataacagctggatatcaatgtattgctcgtgcaattccgcttttttctcgacgggcgattgagtgttaaacgtcatgacantcataaaaatattgtcgccctgtaattcgtaacgacccggcgctttttcttgcggtctggcagctaatgccagcgttaacgcgtcctgtaacgcaggatgtaacccagcagacggtaatgactgtacttcacccatcatcataatttttctccctgggccaacagcgcagccccaagtaaacctgcatcatggcggtagtgcgccgccagtaaatcaacatgaaatgccgctggctcctgcgccagatacgtttccaccagcgccagatacccttctgccagaccaacgctgccaccgaccaccacgcactgacaatcagttgtggctttaatatcagcgatcagccttgccagcacatgtgcggagcggtgaatcagctgctgcgcctgctcgtcgccctgcccggcgcgcatgaaaatagttttcgcatccgcgccagccaactccccctgcgctgccgctgcaataccgcgaccagaagcaatcgcttccacgcaacctgtgcgtccacagccgcagactgggccgtgtggatcggcaagcgtatgcccgatgtgccccgccagaccgccagggccggtaagcagtttgccgccgctcactacaccgccgccgacgccagtggaaacggtgataaacaccatatcggttatatcgccttccagcgcctgatactctgcccatgctgcggcctgggcgtcgttaatggcaatggtcggcaaatcggtaagttgctccagcgttttgactaacggaaagtgtagcaatccaccaagattatgcggattcagcgccagcaaactgccgtcgcgaataattccggttgaagcgatggcaacccgctgcgcatgagcttgcaacggagagactaatgcggataaggcatcacgcaaggcttctggtgtctggctggctggcgtaggaagttcacgacgatcgcggatctgcccgtcagcgccaatcagcgcggcggcaagtttagtaccgccgatatcaatcgccagtgtggtcatagcaccgcctttttcatcgctgtgttgtaccactgacaaatgtgttcaagacgcgtaatggcagaaccgaccgtcaccgcccacgcgccgtggcgcatcgcatcagccgcctgagcaggcgtgttgtaacgcccttcggcaatcacccgacatccggcgtcgctcaaccttttcaccagcgtcagatccggctcttctggcgtttcaggcgtggtatagccagaaagcgtagtgccaataatttcggctcccagcttttggcatgccaggccgtcttccggcgttgagcagtcggtcatcgccagtaaaccgtgatgatgaatacgtgccagcagcgtttcaacaggcaccggacgcgggcggtcggtgccgtcaatggcgataatgtccgcgcccgcctgcgccagcgcatcgacatcttcaatataggccgtgatgcgtaccggagaatcctccagatcgcgtttcacaattccaataatcggcacgctcaccaccgcacgcgtggcttgcagatttgccacaccttcgatgcgaatggcaaccgcgcccgcctgctctgccgctaatgccatggctgcgacgatttcgggtttatcgagcgggctgtccggaaccggctggcaggagacaatcaggccaccgttagcagcgattttttgatccagttgtgcaagtaacgacatacatcttcccttagcgaaaggcccgatacagagaccgggcaacaggattaacttttggttttgactaaatcgtttttggcgctgccaaacggcacggcaccgctaaatggtttgccgtcgatagcgtcatgagtacgcaacgcttccgggcgcagccaacgctgaacacgagaaggcatatccagaccaatcagcaggatcaccacaaatgtcagactgaacgagagcgatgccagcgcagtacccagatccagacgttgagcgatcaacgcgccgatgattggggccagtgcgccacccaatgcgccaacgttataggtaaagcccaggcccgctgcacgctggtcggtatcgaaataaccgccaatcagtttcggtaagatcccggcgatcccttgtccaagcatttgctggaagaacagtaacagaccgagcacccagacgtttgcaccgccaatagcaaataccggaataatcagcagctgcgaggccaacagactacaaacgtacgctttgcgggttcccagccagtcaccgaggaagccaccgacgcagcaccccaccgccgcgccaaagccactaaagaacagcacattggcgacagtatgagggttataagccagatcggttttcagatacgttggcagcagcgcctgaatcggccatgagtagaggaaagcaaacaacacgaccaccatcagcattacgccagttggccagcgtttgcccgtactctgcaccataaagctgataaagattgcggtgcataacagcccaagaacagcgacgatcgcggcattttgcaggttaccggcgaagcagaaccacagcgcagtagccgccgccagtgtcattacgatattggcaatgcgatgttcaccacggtagagaatatccaccattgtgcgtactggtgctttacctgcgtgtttctctttccagtcttctgcttccgggatgtttttacgcagccagagagcaaagatgattggcaaaatgccgataaagaacagcgcacgccagccccagaccggaaccaccaggctgtagacctgagcggcaacgacggcccctacagagaagcctgaaatcagaaagccactggctttgttacgcagatgttttggccagctttcaatgacataggtggcgctggaaccgtattcacccgccatccccatgccgatgaccagacgagcgataaacatggtgatgtagcctggcgcaaagccgcatgccagcgtcccggccgagaagagaacgatgctggtgaccattgccagacgacgcccgtagcggtcacccatagcgccgagcatcaggccgccgaaccagcgagagataaaggctgcggagatcagacttgccgcctgcaccgtcgtcagcccgaattcaccttgtacttcggtgagtaccagggcgattaaaacgaaatcaaaaccgtcaagcagatatcccaaccaggcagcggaaaatgcccgccattgtgcacgattgagatggcgataccacgggatattctgggttgtagtactcattgtgagtctcccgcggtgggcgatgcccacacgctttggtatgaaaattgtagggtacagatgcgtttatttcccctcacccggtaggggcgagcgaggggaaacaactcacccgcgctcttgcatcaactgctgggccagcgccttcagttctggcagatatttttcatctaccggaccaaacggtttgcggcacagcggcacagaaacgacatccatataatgcagaacagttttcaggccgcggaatacacccgttttgatcagtaaatcaatgactttgttgcattcagtttgcagtttctgcgcggtctggatatcgccttctttcagcgccttaacgatcccctgatagcgccagcccatgatgttgtaggtactaccgataccaccatcagcgcccgccagcaggccagaggcgaagatttcgtcgtanccgttatagagcaccagatcaggatgttcacgacggatctgctccatctgatagagatcgccagaggtctgtttcagcgcacctacgccaggcaatgtaacaagtgtgttgatctgatccagggtcagttttaccccactcagggctggaatgttgtacaccaccatcggcaaaccatccgccgaatcaataattgcccgatagtgatcgcagtgttcttcaaagctgaaaggatagtagaacggcgtgacggcggagacggcatcgaagccataacgtttagccgatgccgcaagttgttggctttcggcggtgctgacgcaaccgacgtgggcgatgagtttaatcttacctttcgcctcttcggcgacgatttccagtacctgttcacgctcggaaaggctttgtacaaaggcttcgccggtcgaaccacccacgtataaaccgtcaatgccctgctgaatattgaactgaaccaggcggcgcagactcgctttatccagtgcttgttgttgatcaaaaggagtcaggagtgcagccattacgccacgtaaattcgttgccataaatacctctgaagtgatgcttgtctgataaacgatatacctttatacctgttataccagatcaattaagcaacaccccatacagaaagcttataatgcgatctgcttcactaaagtggcattatttctttttgttggtggtctgaccgaaggcgtgccaggtagcagagacgctgttnagatgcgattgcaacgcacgatcggcttngtcaggatcgtggcggcggatcgcgtcaacgatcgcaatatgctgttgatagctaacgttgttatgctcgtgcagagcctgatcagccacggttggacgtgcggcgatcagccagtcgagcagggcaacgtggatcgccatgaagattgggttaccggggatctccgccagcacgcggtggaaatcaacgtctgagcgaatgaatgccgcgttgttatccagcgactgactgttgatttccagtgcttttgccagcaaatcgatttgctcatcggtggcgtgttcagccgcatagcgcaccaggctggattcaaagaacagacgtaattgttcgaaatgggcaatcccaccaggatgagaaaggaaatntttcgccatgccggaaagctcgccgatgatggtgtccgcagaaggacgtgagacgcgggcacgttcgccgttgtttatttgcaccagacctttgcgttttaacgctgccagcgcttcacgcaccgaaggacgcccgacgttaaagaacgccatcagttcgcgttcagacggtaattgttcaccttcgccaaattcacgacggcggatcatctgttccagctcttcttccaccatttcggagagttttttacgcgccagcgggcggctacgcaagttgcgaccaattgcaggtgaagaatcttcggtttgcgaatcaaatgcgttcataaggcccattctgtaaggtcagtgtgattaacatcatcagtgacatcctatcacaggattgaaagtaggggaaaatggcaggtttttctctttgtgcctcatcattaccataattaacggaataattaactattgcgaaaaattaatgtaacgcagataaaaacatcccgtttgaattatttataagactattcacgagcattatgaatattatgaatgtgttcttacaaaataatcataagcgcatannnnttaatgaaaaatcacctcacctacaattaaaaacacgacatccgcaccataaatagacttgcaaaaaatataacatcattgttttcaatctgccgtttatgggattgacccttttcttttgacacggagttcaacaatgttcggcataattatatctgtcatcgtattaattacgatgggctatttgatcctgaaaaactacaaacctcaggtggtgctggctgcnggtatcttcctgatgatgtgcggtgtctggttagggttcggtggtgtactcgatcccgccaaaagcagcggctacttgatcgtcgatatttataatgaaatcctgcgcatgctgtccaaccgcattgccggattggggctgtcgattatggcggtgggcggttatgcccgctacatggagcgcacaggagccagtcgcgcgatggtgagcttgttaagccgcccgttaaaactcattcgctcgccgtatattattctgtcggcaacttacgtcatcggccaaatcatggcgcagtttattaccagcgcctccggcctgggtatgttgctgatggtcaccttatttccgacactggtgagtctgggagtaagccgtctctctgcggtggcggttatcgcaaccacaatgtccattgagtgggggattctggaaacgaactccatttttgcagcccaggtagcgggaatgaaaattgccacttacttcttccactaccagcttccggtcgcctcttgcgtcattatctcggtggcgatctcccactttttcgtgcaacgcgcttttgacaaaaaagataaaaatatcaatcacgaacaggcagagcaaaaagctctcgataatgtcccgccgctctattacgccattttacctgtgatgccgttaatcctgatgctcggctcgctattccttgcccacatcgggctgatgcagtcagaactgcatctggtggtggtgatgttactgagtttgacgntgtttgttgagttcttccgcaagcataacttgcgcgaaacaatggacgatgtgcaggcgttttttgacggcatgggtacgcagtttgccaacgtggtaacgctggtggtcgcgggtgaaatatttgcgaaaggcttaacgacgattggcactgtcgatgcggttatcaggggtgcggagcattctggtctgggcggtattggcgtgatgattattatggcgctggtcattgccatttgtgccattgtgatgggctctggcaatgcgccgtttatgtcatttgccagtcttattccgaatatctcagccggactacatgtaccagcggttgtaatgattatgccgatgcattttgccacgacgctagcgcgcggtttcgccgattactgcggtggtggtcgttacgtcaggaattgcaggcgtttcgccttttgcggtggtgaagcggacagcgatccccatggcagtcggtttcgtggtgaatatgattgccacaatcacgctattttattaagtcattaaaagacaaaacaggccgccagggcctgtttttgtattacttcacaacgcgtaatgccggtcgaccaccgcgtggtggctgcggtggttcatcgtcaggatgagtgtcatcatcgtgatctggcttgtcgccatcaataaccgacataacggtttcgttgtctgccgatgcctcttcatcattcatgatgctggtatcttcatcgtaggcagcttcaggctcaaacatcgtgcctgcgccattttcacgggcgtagatagccagcacggcagccagcggcacagaaacctgacgcggaatgccaccaaagcgcgcgttaaagcgcacctcatcattcgccagttccagattgccgacagcacgcggcgcaatgttgagtacgatttgcccgtcacgcgcatattccataggaacctgcacgccagggagcgtcacatccaccaccaggtgcggcgtgagctggttatccagcaaccactcatagaatgcacgcagcagatagggacgacgtggtgttagctgtgacaaatccatacagattaactccggcccagacgcatttcacgttctgcttcagttaaagaagcaaggaaagagtcacgctcaaagacgcgggtcatatagcctttcagctctttcgcacccgggccgctgaactcgatacccagttgcggcagacgccacagcagcggagcaaggtagcaatcgaccaggctgaactcatcgctcaggaagtacggcttctgaccgaagaccggcgcaatcgccagcagttcttcgcgcagttgcttacgtgcggcatctgcttcagaagctgaaccgttgatgatggtgttcatcagcgtgtaccagtctttttcgatgcgatgcatgtacaaacggctttcaccgcgagctaccgggtaaacaggcatcagtggcggatgcgggaaacgctcatccagatattccataatgatgcgagattcccacagggtcagctcacgatccaccagggtcggaacgctctgattcgggttgaggtcaatcagatcctgaggcggattgtccttttccacgtgttcgatctcgaaacttacacctttctcagccagcacaatgcggacctgatggctatagatgtcagtaggaccggaaaacagcgtcattaccgaacgtttgttggcagcgacagccatgaaaacctccaggtatagtcagaatttttactgctaccagccaccaggtggccagtcagaagttgtgttacccagtaaggaacgactctctttgttcgaaaatcaaacaaaaaatgagcaatacccgacatttgggcagaaaattggatgatagtttaccagattttgcgacctttgtggtgagtcgatgccggaaatggggaaaaagagatgcgctttagtctgaaatagttgacttagtcccttattggcgatgtggtttttgttttgcctgtctgtcagacggcagcaaaaagcaactttccattttttacgctgattcagaatttaaccataaaaaaacccgccgaagcgggttttttcgcaaattgttttctgccggagcagaagccaattaacgtttggagaactgcggacgacgacgtgctttacgcagaccgactttcttacgttcaacctgacgagcgtcacgagtaacgaagccagctttacgcagttcagaacgcagggactcgtcgtattccatcagagcgcgggtgataccgtgacggatcgcaccagcctgaccagagataccaccacctttaacggtgatgtacaggtccagtttctcaaccatgtcgaccagttccagcggctgacgaactaccatgcgagcagtttcacgaccgaagtactgttccagagaacgttggttgattacgattttaccgttgcccggtttgatgaaaacgcgagctgcggaacttttgcggcgaccagtgccgtagtattgattttcagccattgcctataatcccgattagatgtcaagaacttgcggttgctgtgccgcgtggttgtgctcgttacccgcgtaaactttcagtttacggaacatagcacgacccagcgggccttttggcaacatgcctttaaccgcgatttcaatcacacgctcaggacggcgagcaatcatctcttcaaaggtcgcttgtttgataccaccgatgtggccggtgtggtgatagtacactttgtcagtacgcttgttgccggttacagcaactttgtcagcgttcagaacgatgatgtaatcaccggtatctacgtgcggagtgtattccgctttgtgcttaccgcgcaggcgacgagccagttcagtagccagacggcccagagttttaccggtcgcgtcaacaacataccagtcgcgttttacggtttctggtttagctgtaaaagttttcattaaaagcttacccaataaatagttacacgttggtgaacacccaaacgtcttcaattgttgaggttcacacgacaaagtccggcaaacctaccccttcgaatagcctatgccagcacacaaaaagttttgggaaaaaaactttcttgtaacgtggggtcgcaggattatagagaagtcggggtcaaagatcgacccctttttgtgatttgtggcaggttttaacccgctaaatgctcgcgcttcagatactcttcgctttgcatctcttgcagacgtgacaggcaacgctggaactcaaacttcagccgatcgccctgataaatttcatacagcggcacttctgcactcaccactaatttgacatggcgctcgtaaaactcatccaccagcgcaataaagcgccgcgcttcgctctccatcaaccgcgtcataactggtacatcaaacaacatgaccgtatgaaagagacgtgagagcgcaatatagtcatgctgactgcgggcgtcgacgcacagcgtagtaaaagagaccgccagcgtctggttctcgacgcccattgtcgctaatggccgatggttgatttctaacgtcggtgaattttctcgtttcccccccgccagcgccaaccatagtttatccatttgcgcccgggtttcatcgtggagtggcgaaagccacagatgcgcctgagtgagtgtacgcagacgataatcaacaccagcgtccacgttcattacatcacaatgctgtttaatggcatcgattgcaggcagaaaacgcgcacgttgcaagccatttcgataaagttcgtccggcggaatatttgacgtcgctaccagggtaataccgcgggcgaacagggctttcatcaggccgccaagtagcatggcatcggtaatatcagagacaaaaaattcgtcaaaacagagcacgtcagtttctgctctaaagcgatcagcaataatttccagcggatcggtctgcccctgtaaggcagttagctcttcatgcacccgcagcataaaacggtgaaagtgcaggcgctgtttccgctctcccggcaggctttgatagaaaaggtccatcagccaggttttcccgcgtcctacaccgccccacatatataagccacgcactggcgtatgctttgtgtcttcccgtttaccccacagcttaccgacccgcgccattagcccactcgtcctgggggctggtggcgtgctattgatgagttcctgataaataatttccaagcggctgacggcctctttttgaacgtcgtcgggttgatggctgccttcattgagcgccttcaggtattgcgatgttggagtaacgctttgcatgatcttattgttattccttgaataatcggtgcgccgttgttcacggttgacgaaaaaaaggccgttctacactacgcgatatgcagtcgggattccacttctgtggaattaacggttatagtggcataatcagccgcaggcatggagcctgaagccaacaccctacggaaacaaaagacaacgggagatgttcatgacctgggaatatgcgctaattgggttagtcgtcggcatcattattggtgctgtggccatgcgttttggtaatcgtaaactacgccagcaacaggcgttgcagtacgaactggaaaagaataaagctgaactggacgagtatcgcgaagagctggttagccactttgcccgcagcgcggaattactggataccatggcgcacgactatcgccagctgtatcagcacatggcgaaaagctccagcagcctgctgccggaactgtctgctgaagcaaacccgttccgtaatcgtctggcagagtctgaagccagcaacgatcaggcaccggtgcagatgcctcgcgactattctgaaggcgcatccggcctgctgcgtactggcgcgaagcgcgactaatttatttttcgggcgcagccattgcgccctcctcttctctccctccccgactatcatttaatctggtgtctcattgttagccgtctgaaaattcaataacatcaaactgttttgaatctcttttcttatcattcaggtacgagagcaggaataatgaaaaaacaaacccagctgttgagtgcattagcgttaagtgtcgggttaactctctcggcgtcatttcaggccgttgcgtcgatcccaggccaggttgccgatcaggcccccctccccagtctggctccaatgctggaaaaagtgcttccggcagtggtgagcgtacgggtggaaggaacggccagtcagggacagaaaatcccggaagaattcaaaaagttttttggtgatgatttaccggatcaacctgcacaacccttcnaaggtttaggctccggtgtcatcatcaacgccagtaaaggctatgtgctgaccaacaaccatgtgattaatcaggcacagaaaatcagtattcagctcaatgatgggcgcgagtttgatgcaaaactgattggtagcgatgaccagagcgatatcgccctgttgcaaattcaaaacccgagcaaattaacgcaaatcgctattgccgactccgataaattgcgcgtcggtgattttgccgtggcggtcggtaacccatttggccttgggcaaaccgccacctctggcattgtttccgcattaggacgcagcgggttgaatcttgaaggtctggaaaactttatccagacagatgcttccattaaccgcggtaactccggcggtgcactgttaaaccttaacggtgagttaattggcatcaacactgcaatccttgcgcctggcggcgggagcgtcggaattggatttgccatccccagtaatatggcgcgaacactggcgcagcagcttatcgactttggtgaaatcaaacgcggtttgttaggcatcaaaggcaccgagatgagtgccgatatcgccaaagccttcaaccttgacgtgcagcgtggcgcgtttgtcagcgaagtgttgccaggttctggctcggcgaaagcgggcgtcaangcgggcgatattattaccagcctcaacggcaaaccgctgaatagctttgctgagttgcgctctcgtatcgcgaccaccgagccgggcacgaaagtgaagcttggcctgctgcgtaacggcaaaccactggaagtagaagtgacgctcgataccagcacctcttcgtcggccagcgctgaaatgatcacgccagcgctggaaggtgcaacgttgagcgatggtcagctaaaagatggcggcaaaggtattaaaatcgatgaagttgtcaaaggaagcccagctgctcaggctggcttgcaaaaagacgatgtgatcattggcgtcaaccgcgatcgggtgaactcgattgctgaaatgcgtaaagtgctggcggcaaaaccggccatcatcgccctgcaaattgtacgcggcaatgaaagcatctatctgctgatgcgttaatgtcgtaaaccgggcatcaggctgacgtgtgatgtccggttaactcgtggtatgctgctgccgttcccttttttaatgacgcctccatcatgtttgtgaagctcttacgttccgttgcgattggattaattgtcggcgctattctgctggttgccatgccttcgctgcgcagccttaacccgctttccactccgcaatttgacagtaccgatgagacgcctgccagttataatctggcggttcgccgcgccgcgccagcggtggttaacgtttacaaccgtggtttgaacaccaactctcacaaccagcttgagatccgcaccctgggatccggtgtaatcatggatcaacgcggttatatcatcaccaataaacacgtcatcaacgacgccgatcagatcatcgtcgccttacaggatggacgtgtatttgaagcattgctggtgggatctgactctctaaccgatctggcggtacttaaaattaatgccactggcggtttacctaccattccaattaatgcacgtcgcgtaccgcacattggcgacgtggtactggcgatcggtaacccgtacaacntcgggcagaccattacccaggggattattagtgctacgggtcgaatcggtctgaacccgaccgggcggcaaaacttcctacaaaccgatgcttccattaaccacggtaactctggcggngcgctggtgaactcgctgggcgaactgatgggcattaacacgctgtcgtttgataagagtaacgatggcgaaacgccggaaggtatcggctttgcgattcctttccagttagcaaccaaaattatggataagctgatccgcgatggtcgcgtgatccgcggctacattggtatcggcggacgcgagatcgcaccactgcacgcgcagggcggtggtatagatcaactgcaagggatcgtggttaatgaagtgtcacctgacggcccggcggcgaatgcgggtattcaggtcaacgatctgattatttcggtggataacaaaccggccatctctgctctggagacgatggatcaggtggcagaaattcgccctggttcggtgatcccggttgtagtgatgcgtgatgataagcagttaacgctgcaggtcaccattcaggaatatccggcaaccaattaaggccagcgtgaaagacaaaaaaaccggagtctgtgctccggttttttattatccgctaatcaattacttattaacgaactcttcgcccagggcgatatctttcttgagcgtatccagcataccttccagagcgttctgttcaaatgcgctcagggtaccgatagatttacgctcttccacgccgtttttacccagcagaagcggctgagagaagaaacgggcgtactgaccgtcgccttcaacgtaggcacattcgacaacgccttgttcgccctgcagtgcgcgaaccagagacaggccaaaacgtgcagcagcctggcccatagacagggttgccgacccgccaccggctttcgcttcaaccacctcagtacccgcgttctggatacgtttggtcagatcagccacttcctgctcggtaaaactaacgccaggaacctgtgacaacagcggcagaatggtaacaccagagtgaccgccaataaccggcacttcaacttcgcctggctgtttgcctttcagttccgcaacaaaggtgttggaacgaatgatatccagcgtggtaacgccgaacagtttgtttttgtcataaacaccggcttttttcagcacttcagcagcaatcgcaactgtggtgttaaccgggttagtgataataccaatgcacgctttcgggcaggttttcgcaacttgctgtaccaggtttttcacgatgccggcgttaacattaaacaggtcggaacgatccatacccggtttacgcgctacacctgcagagataagaacgacatctgcgccttccagcgccggagtcgcatcttcaccagaaaaacctttgattttcacagcagtagggatatggctcagatcgacggccacaccgggagtcactggagcgatatcatacagagagagttctgaacctgaaggcagttgggtttttaacagtagtgcaagcgcctggccaataccgccagcagcgccgaggactgcgactttcatcctaaactccttattatattgataaactaagatatgttgctccgctgccgcgaccttaatccacaaaattgccgtttacaatgaccacatctcaagaatgtgtagtcacgcaagtttagcgtttatgcatttaattgccgtaatcaggaacctaagttacgtaattaacaatcgcttatgcattagcgcaacattccaacaggtggtgacaatataccctaccgttcagccaaaacaacatcaatttgataacaattaatttacttttaagcagaatttgcatgccgtgacgcaggcatgtttctcaataacgaaatttgataaaatcccgctctttcataacattatttcagccttcttcagggctgactgtttgcataaaaattcatctgtatgcacaataatgttgtatcaaccaccatatcgggtgacttatgcgaagctcggctaagcaagaagaactagttaaagcatttaaagcattacttaaagaagagaaatttagctcccagggcgaaatcgtcgccgcgttgcaggagcaaggctttgacaatattaatcagtctaaagtctcgcggatgttgaccaagtttggtgctgtacgtacacgcaatgccaaaatggaaatggtttactgcctgccagctgaactgggtgtaccaaccacctccagtccattgaaaaatctggtgctggatatcgactacaacgatgcagttgtcgtgattcataccagccctggcgcggcgcagttaattgctcgcctgctggactcactgggcaaagcagaaggtattctgggcaccatcgctggcgatgacaccatctttaccacccctgctaacggtttcaccgtcaaagacctgtatgaagcgattttagagctgttcgaccaggagctttaatctctgccccgtcgcttctggcggcggggaaaatgttgcttatccctctcaaccccctgctttcccctgcgattaatttaacgaatagtgcgttttactgcgacatgtcattcacacaatgaatacataaggtaaaaaaagcacattatgcaaaattcattatctaattgaaaaaactagaattaacgataaataaccgtatttttaattcttttttgttattaaaattcacatttttaacacttagtatcaactgaaacagttagcgcggtattaattagctcaataattagtgtatacttgattttgtgatatgggtcacgaaacaaaggcccagctaaaagattatgtcgaggtaaaaatcatgaaaatcaaaaccactgttgctgcattaagcgtactttctgttctctctttcggtgcattcgctgccgactccattgatgctgcacaagcacaaaatcgtgaagcaatcgggaccgtatccgtaagtggtgtggcgtcttcgccaatggatatgcgtgaaatgctgaacaaaaaagcggaagagaaaggcgcaacggcctaccagattactgaagctcgtagcggtgacacctggcacgctacggctgaactgtacaaataaaccctcatcgtcttgtccgacgatattgnncccggttcgggggcttttttttgcgctaatgacgaacattaaaacgcaaatgcccttccagctcttcctctgcctcatcaaacagcaatattaacgcgccaaaacggcgacgcgttttctctcccagatgaacaaattcaatctcaagtggtagcggcaggacatcgttcattaacacatcccatagtgagtcgagatcgcgtaccttatctttcgccagaccaaaggtttggctaaagtcacgataaaaatcctcctgactctcaatctcatcaaaatcaaaggtataaatattcatctgttgcnaccgtcacgtttcgcggcgagttctgccgtgcatcgctaagta

SEQ ID NO: 1514 - DNA, 4321 bp, Escherichia coli
  Strain O55:H7
  modified_base (2818)..(2818): a, c, g or t
  modified_base (3372)..(3372): a, c, g or t
catgaaaaaaccgacgcttttggcgtcggttttgacttaactatcggtcaacgcatgttgatacttatggagcatccccgccagccgatgaacctgttccgtcacctgcggtggcgcttgccagatgcgtagcttttcctggtagatttccagttcttccagcaactgaccaaagtaccgacgacgtttatcatcgctacgggcagatatcacatggtctgctgtgcggcgcatttgtcggtgaaacgccgataaatcctcgttaaccgggatcggcgcatcacgcaggcgctggtgggcgataatcatcgtcagcgccaggcgaaatttcggcaaatcccctgggaacttattcatcagcaaaaacagctgctgataaagtgccgggaggtggttctctttacgacgtgccacattggtagtcatcgcggaaacagcggcagaaacaaactgattaagcagtacacgtccagtcctgtcgcgcgatttatcccgcaccagcaaaataacggtgaacgcgagcacacagccgacgatttgccctaatgcgctgtcgagaaactgactgaaatggaaagtcatcgggttatccagcacgataatatttatggtgctggccagcgcccccatcgagcccagtcgccgtttctgtacttctattccgaggaagaatcccagcactgccaggctaatacacagcagcaacatgctctgttgggtattagggataatcaccaaaaagtagagcagccctaacggcagcgcggccagcgtcccgtagataaagtcgatcgccaccatgcgtggattcggcaaacgcattgccagtgacgtcacgaccgcaatcatcaccattgcaccactgccggaagtccagcccgtccacagccagaaaagcgttcccagaatgcaggaaagtgtggttcgccagaagttaaccatcgcatgatgacgttcggctgactctactttgacttccggttcgccttgcaggatctcttcttcggtggcgttgatttttgtgttactgataacgccgcgcttgagaagctgataacgcgttgccgccgcgacccagctataaatggtgacaggcgtttcccgttccccggtccaggcgataactcttcgcaggcgtttgagctgcttgtggacgtcctgcgcggtttctaccggcgtgtcaaaaaattcgcggaaagtatcagtgatcaattccgggcgcgtattctgaataagataagtttcgcaggattgggtaatcagcgtcagcgatagcgtattgatcgcttttaaacgtcgattggcccgcgcccagcgggaagattccatattcaggttgctgcgcatgccttgtagcgccgtggtgcgtcgcaccaggtcgccccaggccttatcgacaacttcaccatcgccatgcttgatacagagttgcattaattgatattgcgcgaccagcaaactttccagctctcgatccacttcttgtttgatcgatcgcggagaaaagagcaaatccgccataatcgcacacacaataccgataacgatctcgctacaacgttcgacggcaaactgcggcgtaagcaatggttccggctgaatggtgatcacaatgatcagcgcggtataaccggccagcccccacgcatacgagttttctattcgtaccagcgaggatatccaggtacaaaaaccggcccagatacagcacaccagaatcatcaataatggtgcgcggatcatcgcaatgatgatcaccagtccggcaatacagccaataaatgtgccgatgatgcgcaaaaagccacgatagcgaatagcgccagaatacggttcacctcccgcagcaaaggccggaccggcggcaacaatcgccgctgtcagtaccgcccagcgtggcgtttccagctggaagtgaaagccaacaaacagcgccagtacaatggcggtcgccagttttaccgcaaagcgaatatgttggttagcaatggagaaaatacccatcgtgattaaccaaactcacgcaggcgatgggccattttacggaagaacgaatcctggctttcgtcgcgatcttgtttgccagtgaccaccactgtagcagtggtgcccgcaggccagatgttctcttgctggttgtcgagacgaatacgaaccggaacacgttgcgccaaacgcacccattcaaggttagagtcgatggtcgccatccctttgtcgtcacgcgtgctgctggcgttggtgaccccagcggcaacactatcaacagtccctttcagcactttgttactgccaagcggcgtgatctctgcacgatacccagggcgcaccccttccagcttagtttcttccatataggccagtacatagaaagagttctgtttcaccagcgcaaccgccgttgatccacgagtaataaactcaccggtatagacgttgaggttggtcacccagccatctgctggcgcgcggatcaccgtgcgttcaagatccagttttgccagatcgcgggtcgcctgcgctttcgctaactgatgcagaaccgtttgtagtacgttgttggcctggtcgatctcttcgcgagacatcgcctgcacaccgagacggttacgacgtccggcctcctggcgtttctcctgtgccagtacctgataataagcaacatcggcttgcgcttcctcaagcgccttttgatagcgcggctggtcgatggtgaacagaacctgtccttttttcaccagcttgtcatgaacattcacctgggtaatgagtccagaaacgtccggcgcgatcgcaacgacgtcagcgctaaagcgcncgtcacgcgtccagggggattcggtgtaatagacccaggcattaaaaattgcgatgaaggccagaatgactaatacgaccgtgatggccgtacgggagaattttcttattagtgttttcacttcaacctcaaacgaacagtcgcgatatcaaataaaacaagcagcaatagagcgcggtgttgaacaacgccggatgccagacaaagtcgtagatacctgttggcacaagtacccggcgcaccagccagaaaatcgccagtgataaaagcaattcaaaaaatatcggtgggaaggacagcccaaacaccacgataacgggaaacagactcatgttgaccttggttgtatagagagagcaggcgttattattttcagcatctgtcgccgcagagaagggcatggaaagccgggcgagagcaacattgctgtagattgatatttaatatattagcgtaactgttatgctgttatctatattatgtgatctaaatcacttttaagtcagagtgaataatggaacgactaaaacgcatgtcggtgtttgccaaagtanttgaatttggctcttttaccgccgccgccagacagctacagatgagcgtttcgtccatcagtcagacggtgtcaaaactggaagatgagttgcaggtaaagctgttaaaccgtagcacacgcagcattggcctgaccgaagccggtagaatttactaccagggctgccgtcgtatgcttcatgaagtgcaggatgttcatgagcaactgtatgccttcaataacacccccatcgggacgctacgcattggctgttcttcaactatggcacaaaatgttctcgccgggctgacagccaaaatgctgaaagaatacccaggtttgagcgtcaatctggttaccggaattccagcccccgacctgattgccgacggtctggatgtggtgatccgcgtcggcgcgttgcaggattccagcctgttttcccgccgtcttggcgcgatgccaatggtggtgtgcgccgcgaaaagctatctcacacaatacggcataccggaaaaacccgccgatttaagtagccattcatggcttgaatacagcgtgcggcccgacaatgaatttgaactgattgcaccggaagggatctcgactcgcctgatcccgcaagggagatttgtgactaatgatccgatgacgctggtgcgctggctaacggcgggtgccgggatcgcctacgtgccgctgatgtgggtgatcaacgagatcaatcgtggggagctggagatcctgctgccgcgttatcagtcagatccacgcccggtttatgcgttatataccgaaaaagataagctgccgctgaaggtacaggtcgtgatcaactcgctgacggattattttgttgaggtcggtaaattgtttcaggagatgcacgggcgcgggaaagagaagtaattcatattgtactgttacgttgtacaaacctgtgccaacgggttcccctcaccctaacc

SEQ ID NO: 1515 - DNA, 7303 bp, Escherichia coli
  Strain O55:H7
  modified_base (1232)..(1232): a, c, g or t
  modified_base (1808)..(1808): a, c, g or t
  modified_base (3869)..(3869): a, c, g or t
  modified_base (6028)..(6028): a, c, g or t
ccaaaggggcgaggggaccgttcgtgcacgaggaaggattaattatccttctgaaaatactgaaattattacgcagtaccgccaacagtcaggttatcaactttcagcgttggctggcccacgccaaccggcaaactttgcccttctttaccgcagacacccacgccgttatccagtttcaggtcgttgccaaccatcgaaatctgctgcatggtttcgataccggaaccaatcaacgttgcgcctttcaccggcttcgttactttaccgttttcaatcagatatgcttctgaagtggagaaaacgaatttgccggaggtgatatccacctgaccgccaccaaagttcggtgcatagataccgtactcaacggattcaataatttcctgcggggtcgatttacccggcagcatataggtgttggtcatacgcggcatgggcagatgggcgtaggattcacggcgaccgttgccagtcggcgtcatccccatcaaacgcgcgttgagtttatcctgcatgtagcctttcagaatgccgttctcaatcagcacgttgtactggcctggcgtaccttcgtcatcaatcgccaccgaaccacggcgatcgaccatcgtaccgtcatcaaccacggtacacagttctgaagccaccagctccccgacctgtccactaaatactgaagtgccacggcggttgaagtcgccttccagaccgtgacctaccgcttcatgcaacagcacgcccggccaacctgcgccaagtactaccggcatggtgcccgctggtgcagcaacggcagaaagattgaccagcgccatacgtactgcttcttttgcccatgcatccgcacggacttcgccgtcgagatcggcaaggaagaactcataaccaaaacgaccgccgccgccactggcaccgcgttcgcgtttgccatcttcttcgaccagaacgctcacggaaagacgcaccagcggacggacatccgccgctagcgtgccgtcggtggccgcaaccagaattaattcatagacaccactgaggctggcagtcacttcctgtacgcgcttgtccgcttcgcgggcaaccttatcgacgcgacgcaggatatccagcttctcttcacggctcatgctttgcagcggatctaccgaggtatacaacgggctatgctctaccgcgcccagcgtctgtactttgccatcaccgctatcacgggcgatggtgcgcgccgnttgcgcactctgttccagcgccagcaggctgatttggtcagcgtaagcaaatccggttttttcaccgctgattgcacgcacaccaacgccctgatcgatgttgtaagaaccatctttaataatgcggtcttctaaaacccaggattcgtgatagctcgactgaaaatagagatcgccataatcaaggcgacgttcggccagttgaccgaggatcacgaacaagtcctgatgtttcaggccgttcgccgctagcaattgttcacttaccaggttaagactcatcgtttttgctactcgttagttactgcagtagaggattttttacggctgccggatgcggcgtgaacgccctatccagcctacggttatgttctggctcgttggcctttggcaacgattatcctatgagattggggcaattacgcgccctcgtcaaatcattgcgctttttctttacgcggttggcgcaacacttcgttgatttgcggatcgtccagcggacccgaaatgtgatagcgcaaaatggagactttgctccacagcggccccagcactttactggcggcaaacactgcngcgccaacaatggggttaaccgcaaaagccgcagccacgcccactgtcgcagaaatctctggtgcgacaaccgcttccatattcaggtcgcgacgtaccagatttaccgaccctttcatggcgatatccgcctccaggccatccaccagcgtgtcgtcggtgtgcataacgccgtctttaatccacgcggtgctgcgaatggagtcaaaatagaacccttcgccaaaagtgtctctgaaatcaaaacgcagcttacgcatcagggcatctacgctcaataagcgcagcaattgcccggcatgtccggtattgatttcggtaatttcgcctttacccagttgagtatgaatgatgccattcaacgtcgcctcatctggctgccacggtgctttacgccagtgtaaatcgtaatccacattaaatgacgactgccgtatgggcgtcgtgacaccaaaaaattctgcggcggcatcaattttctgcccgcgcagttttcctttcagcgaggtacgttcattccccggattgttaatccattcaccatcggcagtgagccgcgaaaaaccagtatcaatcagtccattggtcagcgttaatgtattgccagaaatggtgatatcactgtcaatgcgcccgaatttttgcccccagaaccagcactctgcgcatcgtatttgggcgtccgaccagccacggaagttaatgcgttccgttgtcgggaaaggtgatgacggcgttgaatcaccacgagttttcgccacgctcgggttgtaataaagatatttgatattcgccagccacggcgcgttattacgcatcgccagcgtggcgttgatttcacgcccctgcgcctcaacctgggtgccatttgccgtcggttgcgaaacaatactcaggttattccattgctgatttcccagcgacaacataggcgtacgtaacgttatgtgttgtgggaaactcgctgcaccaccgacactctccgccgcacctttctgaaacagggccagccactcggcaccattcatcggcggcatattgagttcaacaccactttgttccggcaacggcgggagcgttttactgtctgccgcccaaatagcacggtcgagcgtcagcttttgaccgagcaaccagcggctattgaaatgattatccgcaccagcctgtccggttaattcaaagctgttgagattgccatcaaccttaacgtttaccggcagtggttcacccgcaggtttggctaacggtgaaggtaagtgactgctcacattcttcaaatcgccgtttagctctacgttatacgtcgcgccagcatgataaggcagaacaatgcccactttaccatcccacgccacgctgccactcaatgcttcgttcaccgctgcaggcagaacgccggttttcgccggttgccagttaccgttgagattcaccgcgacctggtaggcttttgccccttctttggtggaaaaatccacgttcaacggctgattaaaccagcttgctgtcagtggttcactttgcagatcgccattgataaagctgaatttaccgctcaaatttttcagggtgctgtcgagtggtttgataaacagactgttattacgcagcgtcacttcacctttcgcggttaccagctcgccgttcagcgggatatcaagatgtaagcgagcattcacatcgccgtcgagctggagttcttgcagggtcgcacccagagaatctttcagcggtgtctcatcaaagtaagggccaacggctttacccggacctttaatgtcagcgtcaatcagcagtttttcttttgagtagtcagggatcactgcggtgagattactcgcgcgcacgccgcccagattaacgccatcggttttcatccataaaccgtcgttaataaagtccagttcaataccaaggttagttaatgcaggccagtccggctggaaggcaaacttcgcgttgcgcagcggcaccagcacttcaaactgaccttcgttgtgtttataggggaagagttgcggattgccaccataaaccagcgtcgcgttatccgcttcnccgccctgaatcgcgccacttaagtaatcaaccaggtctttacccatcaagttttccgggaaatagcgccaggcttgtgaaccatcatcggtactgatgccagccagaatacccagccagggttcatcgttagcaggttgcaggtaacgaaaaccgccgcgcgcatggacggctttggctttaacgtcaatattacgcccatccagctggaaacctttgtcattgttcagccagcttatagttgcctggccgtcggcgatttccagtggcgcacggaataccgtttcgtaaggcatctttgcctgcttcatcgacgcggtaagcaaaccattttcaacgctgccggaaagcgtcccggagaagtgttccgcacccggtaataatttccattgcttccaggccagatcgctccacgatgcctgaaaacgggtcttgtctgccgcctgaagcgggatatccagcgccagagtgttaatcttgccgctcggttgtgtagagcgccaaacatcacccagtgcaggtgaaagtttcgcggccagcgggcgtatgccctccaggcctgccagctccagattactggcgcgaatccggagttcgtcactgcgtttattgtctttgccgccaacgtcctgttccggtatccaggccagcgtcaatgctccgctcggccagggtttgccgtccatcgtgatccgtgtatcgggaatagagaactgccatcccggattttcacgcgtaatatgcgcggtcagattatccaccgacagcgtatgcgtttccttctcgcccaaccagctggcaccaccctgtttcagccagacgtcaccgccggttacatcgcctttgtcgatcgtcatccagccttcaagggagaactgcgccgtttccagcgcaatattgtcctgcatccatttaccgagccacggcttcaggtcgatgtcatccgcctggagccagacgcgaccattgcttaacaacccctcatcatcgcgcaaatccatgcgcacctgcatcacgccgtgctgtccggtaaggctggagaggcttaccaggccttccgcacggtgtcgacgtggatcgttcagccaggtgagttgtgggatcgccagctcggcgcgctgaccggatggcgtcaggaaactgacttcactgtcgcggagatcgaaatggtcaaattgacgaagaaacagatcgctgatgtgactggcttccagactgtcatcgctaccaccgctggtgataggagtgttggtgcgaaagcgcagctgccagaaagtgaggtcgcgaaactgccagcgcatatgtaacaggctctgccagacatccagcgccagagtaacgcgtttaaccgaaaattcgccgccatcctttagttctgcacggatgtcgtgcgcttcaagcgtcgggccaaaattctgccagctggctgagagctgactggcttctaccggcatgccagtcgcggattctattttgttgaggatttccggacgccaggcgtcaagatgcggtaaagcaatacgcaggccgctaaccagcagggcagcgatcacaacgagcgcggctccagtaagcagtaaaatccccggcaatcgcctcacccgtcactccttgtctgctaaaaatgtgactcaaaaaccctttgccggatggcggcccagcatctgtttacatcattacgacgtcaaactgctcctggttatagagcggttcaatttgtactttaacctgtttgccaacgaaaatttccacttccgccagcgagtgtgactcttcgcctttcaaggcttcggctactgccggagaagcatagaccaggaaacggtcggagtcgtaagcatggtgtacacgaacaatctcgcgcatgatttcatagcataccgtttccacggttttcaccgttccgcgaccgtggcaggttgggcattcgttacacagtacgtgctcaatgctttcgcgggtgcgtttacgcgtcatctccaccagccccagcgccgaaaaaccattaacgctggttttcacccggtctttgctcaacgcctgctccagcgagtgcagcactcggcggcggtgatcttcattattcatatcgatgaaatcaataatgataatcccgcccagattacgcaaccgtaactggcgagcgatagcctgcgtcncttcaatattggtattgaaaatggtgtcgtccagattgcgatgaccgacaaacgctccggtattgatgtccacggtggtcatcgcttcggtctggtcgataatcagataaccaccggatttcagttcaactttgcgttccagcgctcgctggatttcgttttcgacatcaaagagatcgaaaatcggctggcgtccggtgtaatgctccagcttgctggtcatctcgggaatgtactccgaggtgaactcaagtaacgcttcgtaagtcaggcgtgagtcaacgcgaatgcggtccagttcggcatcggcgaaatcacgcagaacacgctgcgccaacgccagttcgccgtacagctgataacgggtctgcgggcgctttttacgctccataactttggtccagacgcgtttcagataagcggcatcggaggccagttcagcctcgccaaccccttccgctgcggtacggatgataaacccgccctgctcgtcgcaatactctgcgaccacttttttcaggcgttcacgttctgattcgctttcaattcgttgggaaaccccaacgtgagaagcccctggcataaagaccagatagcgagaaggcagcgtgatatcggtggtcaggcgcgcccccttagtgccaagcggatctttcaccacctgcaccatcagatcttgcccctgacgaaccagttccgagatgtcgcgcaccgtgaattgcttttgttcttcacccgccacacattcggtgtgcggcatgatgtcagatgcatgaagaaacgcggctttatccagcccaatatctacaaaagccgcctgcatacccggaagtacacgacttacacgacccttgtagatattgcctactattccgcgtcgcgcctcacgttcaatatgaatttcctgcagaataccgccatcaatatacgccactcgcgtttccgaaggcgttacgtttactaacaattcagccgtcatgtttatcccttttctcacgcagtgcgttaaaattacttaataattcatacgtttcaaccagcggtaagccgactacggcttgatagctgccatttatcttcctgacaaaacagccacccagcccctgaataccgtatgcacctgctttatctaacggttcaccgctggcgacatagcccgcgatgtcttcgtctgttaacgttctgaaagtcacatcggtgaccaccaggcaatcgagaatgtgccggctgtcggccaacgccactgccgtcatcacctgatgggtctgacccgat

SEQ ID NO: 1516 - DNA, 8481 bp, Escherichia coli
  Strain O55:H7
  modified_base (3)..(4): a, c, g or t
  modified_base (1403)..(1403): a, c, g or t
  modified_base (2520)..(2520): a, c, g or t
  modified_base (2748)..(2748): a, c, g or t
gcnnaacatctgcgccgcatgctctgcgtcgcgcggtttctccagcacttctccgttcaggataacgatagtatccgcacccagcaccgggagatccttcgccgtttgcgcgacacctgcccgtgctttctcgcgcgccagacgcacaacatactgctgcgcgctctcctgcggctgacgctgctcctcaatgcccgtaacaatacgttcaaaggtcacgccaagttgcgcaagtaactcctgacgacgcggagaaccggaagctaaatacagagaagtcatagaaacctttattgcactgcaaactgctgacggactttacgcatcagcaagaaaatccacggccagagcaccccattgactacactactccagaacacttccggtctgaaagagacgttaatcactaaaaactctgcccagaaaacaataatatccaccaccagcgaaagcaacatgacgaccagcgcctgctgccataatgcgaggttgcggaaaagctggtatttcagcgccaccaggtaagcaatgatgctcatcgccaatacgcgtacgccaagcgtcgagccgctgatcagatccagtatggcacccatcacaaaacctgtgcccacatttacgcgatggggcaaggccaggatccaatacaacaagatgagtaacacccagtttggccggaaaacaatcaggttatccggccagggcatgatttgcagcaaaagcgcaatgaggaaagagagccagattacccagcgtccctggctacgatagctcgccactattgccctcccggcgcacgcgcaggcggttgagcaccactttgcggcggcgtagccctttgtggagagcgattagcagcgggctgtgtgggcgcagcaggcgcagtagctgcatttcctgtcgtgggttgctgcggagtcggctgagcgatccccgttgccggttcaggtaactttggccccatcgcgtctggcgaaggcaatacctgcggcatcatctgcatcagacgttcattagcaacacgatgcacctcttccggcgtcatcgggttagcgccgttacgatctgccccccacagcagcagcagataacgcaaacgttgcagccctgcagtcggacgcgcctgaatcacagtataagcgcgctgggtatcgagttttacggaagagacaaccgcgaccggatagccttccgggaaacgaccgcccagaccggaggtcaccagcacatcaccaacacgaatatccgtattcgctggcagatgctcaagctgcaaatcatccgtacaaccgttaccggctgcaattacgcggatatcgttgcgcagcacctggattggcagcgcgtgggtcgcatcacaaatcagcagcacgcgactggtcagtttagcgacggccaccacntgaccaacaacacctttgtcgctgatgaccggctggccttcataaacgccattaacgctacctttatcgataacaacttgatcgctataaggatcgttaaccgtggagataacctgagtcaccattttctgctcatcctgacgcagcggggaacccagcagctcgcgcagacgcgcgttctcctgtttgtattgtccaagcatcagcagttcactgtttttcagcaacagttcctgacgtaacgcccgattttcaagttctagttggtcacgcgaggccagcgtctgcgatacgccatccagcaattcacgaggagcattggaaacaaagtagaaaggactgacggcggtatccatataagtacggatttgactgaacgtccccaggcggctgtcggcaataataatgccgagcgccaccagcaccgccagaataaggcgaatctgtagcgacgggccacggctaaaaattggcttcataagttatgcgtattctcgtatcagaccaggcagggtaaacagacgcttcccctgcctgcatccgattactcttcgctgaacaggtcgccgccgtgcatgtcgatcatttccagcgctttgccgccaccgcgcgccacacaggtcagcgggtcttcagcaacaacgactggaatgccggtttcttccattaacaaacggtcaaggttacgcagcagtgcgccaccaccggtgagtaccatgccgcgctcggagatgtcggaagccagttccggcgggcactgttccagtgcaaccattaccgcgctcacaataccggtcagcggttcctgcagtgcttcgaggatttcgttggagttcagggtaaaaccgcgtggaacaccttctgccaggttacggccacgaacttcgatttcacggacttcatcgcccggataagccgaaccgatttcgtgcttgatacgttctgcggtggcttcaccgatcagagaaccgtaattacgacgcacatagttgatgatagcttcgtcgaaacggtcaccaccaatgcgtacggaagaggagtaaaccacgccgttcaaggagataacagcaacttcagtggtaccaccaccgatatcaaccaccatagaaccggtcgnttcagaaaccggcaggccagcaccaattgcggcagccatcggttcttcaatcaggaagacttcacgggcaccagcgccctgcgcggattcacgaattgcgcggcgttcaacctgggtcgcgccaaccggtacacaaaccagaacgcgcgggcttggacgcataaagctgttgctgtgcacttgtttgatgaagtgctggagcattttttcagtcacgaagaagtcggngataacgccgtctttcattgggcgaatggcagcaatattgcccggcgtacggcccagcatctgcttcgcgtcatgacctactgcagctacgcttttcggtgaaccggcacgatcctgacgaatggccaccacggaaggctcattcaatacgatgccttgtccttttacataaatgagggtattcgcagtacccaggtcaatggacaagtcattggaaaacatgccacgaaattttttcaacatactaagggataatcctgaaagctggggcggaaaagaaaatccgcttactttaccaaccacacgcagcagcgacaaggcgcaaaaatcatctgctacggtgaaaattagtgcagttcgtttcctttgttacaaatctctgcctgagtccagaaaggcttaatgcatcagcagcattcctcgcctgtttgcaaccgcgtaaggtcattcatctgcatatgtgctgcaacaatctggcgagcagacaagcacactcccatgagacgcagcgcgcgttattctacgtgaaaacggattaaacggcaggttaaaccgagtatctttgtgaatattttttcacgttagtatcaagtggcggtgaggacgcgaaaaaatccccttgcccgcctgtaacaccgcgctgaatcagggtctgccactcgcttcgcgaacgcacaccggtggcgtaaacctgggtgctggtccctgagcaggcttccaccaggctttgaaccagcagctggttctccgttcgcttctcaatgtttctgaccagccccggatggagcttgagtaactcaacattaagttctttgatccaactggtgcttaccagcgtcaaaccagcctggttgacggctacccgtacccctaaagcattcactaaacgaataacaggttgtaaacgactgatatgttgacctacatcggcctctgcaagttcaataattatgcgttttcgttgtgatttttcacattgcattaacgtatcgcgcagccaacgctgaaaacgcgggcgaatcagcgactcaacggtaacctgaatcgccagattttcctctggccagtaacgcaatagtggaataagacggctgatttgcagacggtcatactcttccgataagccaaactgcaagaccatcggcatatactccgccgagctaacctcttcattaccatcaaagatgcggcacatgagttcgcgatgatgaacctgaccttcgcgagtaaccgccggtttttgataaaggcgcgggccgccgcgactgagcatttgctcgataagcgtacgccagcgaacattaccgcgtcctttttcaggcaacgagtcatcgtaaatagcccagctattgccgccctgcaatcccgcattacgcgtggcagactctgcatgttccattacctgctcggtatcctgaccactacgccaggcgcagataccaatgtggatcatatcgtcgcgatcgagcattttattgttcggcaaggtatcgacggctttgattaactgaccggcgatgctctctgcctcttttaacgtccggtgcggtaacagcgcagcaaaatcactgcggtggtaacgcgccagcagtgcgccagggtagcgcatcataaatgtcgacagcagattcgtcagagtgaagaactgttcttcaacctggctgtgcccccaggtatcgctcaacatattgaaatccggcagacgaatcatcatcacgatcccgtgggtacctactttctcctgatcttccagtaacgttgctaactgattatcgaaaaagagtcggttattgaggccggttttcacgtcctgtgcggcataagagcggatcagcgtatcaagacggctgtgttgttcgcgtgcgttctgaatttcacgaagcagcgtatccagcgcactgctggttctgggcggccattcatagatggttcccaacacattagagccacgctcaccgtttaagatacgagtagcccgggtttccagcaattcttgcccggcaagttgccgttgtaaccagcgtaccgccagaaagagcataagaatgataaagccaatcgcccctgtgagcggcgcggtggtcatcaacgaatggaaatagttgcccatcggatcctgataaaccagacgcaacgacatccccggatgctttatcaacggaacgctcagttcacgaaacagatcgctggtgccaaccggacgataactaccatttctggccagggtataaacctgcttatcaccatggagcaggtctacacgaacgatatctgccgacatcattaattcggtaatttgtggccttaatgcgctgaagtcattcgacacaaggtgggtatcaatcgccgtcgccaccgcctgaacgcgatgactaaacttatactgaatggcgttgtagaaacttagcgaacagcccagcaaagtcacaaaaattgttaacccggtgagcagcgtaacaaaggccgaaaatttcgtcgttaatctcatccttgtgttaactccgatagtgaggaagcgggcatactagcaaatcagatttatctcgcaatttattgcgcttcatcggctttgcttttccattagcgagtatagtcttcagaaattattttccaatccatcatgcacatgaggaccacttatgcaggcgttacttttagaacagcaggacggcaaaactctcgcatcagtacagactctggacgaaagtcgcctgccggagggcgatgtcacggtcgatgttcactggtcgagcctgaactataaagatgcgctggcgattaccggtaagggaaaaatcatccgtaattttccgatgattcctgggatcgattttgccggaactgtacgcaccagcgaagatccgcgttttcatgccggtcaggaggtgttactcactggctggggcgttggtgaaaaccactggggtgggctggcggagcaggcgcgagtgaaaggtgactggctggttgccatgccgcaagggctggacgcgcgtaaagcaatgattatcggtactgccggttttaccgccatgctgtgtgtgatggcgctggaagatgccggtgttcgcccgcaggacggggagattgtcgtgacgggtgccagtggtggcgtcggcagtaccgccgtggcgctgctgcataagttgggttatcaggtcgttgccgtttccggtcgcgaaagtacccatgaatatctgaaaagtttaggtgccagccgtattctccctcgtgatgagtttgccgaatcccgtcctctggaaaaacaagtctgggctggggcaattgacactgttggcgacaaagtgctggcaaaagtgctggcgcaaatgaattacggcggctgcgtggcggcctgtggtctggcgggtggttttactctgccaaccacggtcatgccatttattctgcgtaatgtccgtttgcaaggggtggattcagtaatgacgccaccagaacgccgcgcacaagcctggcagcgactggtcgccgatttaccggaatcattctatacccaggcggcaaaagagatatctctgtcagaggcaccgaactttgccgaggccatcattaataaccagatccagggtcgcacgctggtgaaggttaactaaccatttagcaaggaataataagagagggaactcattttgaaatcattattcaatcggttaacgggaaaagcggttagccggacagctttcgtcgaacaccttggtcatgaagttgtacaacatcatccaaactggaaagtcatgatttcgactgaccataaattgatgcgcattgatactccactaaacagctattattgatacgcctccgtcgcctgttaggtttatggtgctttgcctgggcgacgctacgcttaaccccttacttatttctggtaccatgaggtgaataatctgattttgtttgactacaaattaatcactcgaacctatttaatgctgagcattgtcaatcggttaattttgcgtgctttagcattcacatctatccagacgatgcagtgaaaattgggtaatccccagcaaccgctgcgtaatgtcgtctatcttgtcgcgatcctggcatccctacattatttgtggtctgtgacgattatctcattgcagcccctcatcttcgcagggctggctttacagcttttcaccttacgttataagaagttccgtcgatgatggcgctaatttcgtgaattgtgcggcttgttgcaaattacacggtgttgaaggttatttacatgttagttgttgattatcttccctgataagaccagtatttagctgccaattgctacgaaatcgttataatgtgcgacctcgtcctccctgacgcagtttttgcgctgcggaaaaggtgacattggcgcaacgaaggtatattttgttttttgccggaggatagcagcagatcgctgcacaatgtccgtcaagtctaacattgacactctggggcaaaatagaccggcgtcccgacctgctggaatttatcgctatgcatacagctgtcggggcatacgctttacagacggcggtgaaacgcctgtcacaatcacactaaacaaagagtacggaacccactcatggatattcgtaagattaaaaaactgatcgagctggttgaagaatcaggcatctccgaactggaaatttctgaaggcgaagagtcagtacgcattagccgtgcagctcctgccgcaagtttccctgtgatgcaacaagcttacgctgcaccaatgatgcagcagccagctcaatctaacgcagccgctccggcgaccgttccttccatgaaagcgccagcagcagcggaaatcagtggtcacatcgtacgttccccgatggttggtactttctaccgcaccccaagcccggatgcaaaagcgttcatcgaagtgggtcagaaagtcaacgtgggcgataccctgtgcatcgttgaagccatgaaaatgatgaaccagatcgaagcggacaaatccggtaccgtgaaagcaattctggtcgaaagtggacaaccggtagaatttgacgagccgctggtcgtcatcgagtaacgaggcgaacatgctggataaaattgttattgccaaccgcggcgagattgcattgcgtattcttcgtgcctgtaaagaactgggcatcaagactgtcgctgtgcactccagcgcggatcgcgatctaaaacacgtattactggcagatgaaacggtctgtattggccctgctccgtcagtaaaaagttatctgaacatcccggcaatcatcagcgccgctgaaatcaccggcgcagtagcaatccatccgggttacggcttcctctccgagaacgccaactttgccgagcaggttgaacgctccggctttatcttcattggcccgaaagcagaaaccattcgcctgatgggcgacaaagtatccgcaatcgcggcgatgaaaaaagcgggcgtcccttgcgtaccgggttctgacggcccgctgggcgacgatatggataaaaaccgtgccattgctaaacgcattggttatccggtgattatcaaagcctccggcggcggcggtggtcgcggtatgcgcgtagtgcgcggcgacgctgaactggcacaatccatctccatgacccgtgcggaagcgaaagctgctttcagcaacgatatggtttacatggagaaatacctggaaaatcctcgccacgtcgagattcaggtactggctgacggtcagggca

SEQ ID NO: 1517 - DNA, 3441 bp, Escherichia coli
  Strain O55:H7
  modified_base (2726)..(2726): a, c, g or t
  modified_base (2730)..(2730): a, c, g or t
  modified_base (3144)..(3144): a, c, g or t
tctatctggcggaacgtgactgctccatgcagcgccgccaccagaaagtggtcgaagaagcaccagcaccgggcattaccccggaactgcgtcgctacatcggcgaacgttgcgctaaagcgtgtgttgatatcggctatcgcggtgcaggtactttcgagttcctgttcgaaaacggcgagttctatttcatcgaaatgaacacccgtattcaggtagaacacccggttacagaaatgatcaccggcgttgacctgatcaaagaacagctgcgtatcgctgccggtcaaccgctgtcgatcaagcaagaagaagttcacgttcgcggccatgcggtggaatgtcgtatcaacgccgaagatccgaacaccttcctgccaagtccgggcaaaatcacccgtttccacgcacctggcggttttggcgtacgttgggagtctcatatctacgcgggctacaccgtaccgccgtactatgactcaatgatcggtaagctgatttgctacggtgaaaaccgtgacgtggcgattgcccgcatgaagaatgcgctgcaggagctgatcatcgacggtatcaaaaccaacgttgatctgcagatccgcatcatgaatgacgagaacttccagcatggtggcactaacatccactatctggagaaaaaactcggtcttcaggaaaaataagactgcaaaagcgtcaaaaggccggattttccggccttttttattactggggatcgacaacccccataaggtacaatcctcgctttcttcacccatcagggacaaaaaatggacactcgttttgttcaggcccataaagaggcgcgctgggcgctggggctgacccttttgtatctggcagtttggttagtagccgcttacttacctggcgttgcccccggttttaccggctttccgcgctggtttgagatggcctgcatcctgacgccgctgctgtttattggactgtgctgggcgatggtgaaatttatctatcgcgatatcccgctggaggatgacgatgcagcttgaagtaattctaccgctggtcgcctatctggtggtggtgttcggtatctcggtttatgcgatgcgtaaacggagcaccggcaccttccttaatgagtatttcctcggcagccgctctatgggcggtattgtgctggcgatgacgctcaccgcgacttatatcagtgccagttcgtttatcggcgggcctggagctgcttacaaatacggccttggctgggtattgctggcgatgattcagcttccggcagtctggctttcactcggtattctcggcaagaagtttgcgattcttgcgcgccgctacaatgcagtgacgctgaacgatatgctgtttgcccgctaccagagtcgtcttctggtgtggctggcgagtttgagtttgctggttgcgttcgttggtgcgatgaccgtgcagtttatcggcggtgcgcgcctgctggaaaccgcggcgggtattccttatgaaaccgggctgctgatttttggtatcagcattgcgttatataccgcctttggtggctttcgcgccagcgtgctgaacgacaccatgcaagggcttgtgatgctgattggcaccgttgtgctgcttattggcgtggtacatgccgctggcggcttaagcaacgcagtacagaccttgcaaaccatcgatccgcaactggttacgccacaaggcgctgacgatattctgtcgcctgcctttatgacgtcgttctgggtactggtgtgctttggcgttataggcctgccgcatactgcggtgcgctgtatctcttataaagacagcaaagcagtacaccgggggatcatcatcggtacgattgtagtcgcaatcctgatgttcggtatgcacctggccggagcgttaggtcgtgcagtgatccccgatctcaccgtaccggatctggtgatcccgacgttaatggtaaaagtgctgccaccgtttgctgccgggatctttctggctgcacctatggctgcgatcatgtcgacaattaacgcccaattgctacaaagttccgctacgatcattaaagatctctatctgaatatccgtccggatcaaatgcaaaacgagacgcgtctgaagcggatgtcggcggtaattacgttagttctcggcgcgttgctgctgcttgccgcctggaagccgccagaaatgatcatctggctgaatttgctggccttcggtgggctggaagccgttttcctgtggccgctggtgctgggtctttactgggaacgcgccaacgccaaaggcgcgctaagtgcgatgatcgttggcggcgtgctgtatgccgtactcgcgacgctgaatattcagtacctgggcttccaccctatcgtgccctcgttactactaagtttgctggctttcctggtcggaaaccgtttcggtacatccgtcccgcaagctaccgttttgactactgataaataaagagttttgccatgccttggatccaactgaaactgaacaccaccggcgcgaacgcggaagatcttagcgatgcgctgatggaagcgggtgccgtttctatcacttttcaggatacccacgatacgccagtatttgagccgctgccgggcgaaacgcgcctgtggggcgacaccgatgtgattggtctgttcgacgctgaaaccgatatgaacgacgtggtggcgattctggaaaaccatccgctgctcggngcangcttcgcgcataaaatcgaacaactagaagataaagactgggagcgcgaatggatggataatttccacccgatgcgctttggcgaacgactgtggatctgccctagctggcgtgatgtaccggacgaaaacgccgtcaacgtgatgttagatccagggctggcgtttggtacgggtacccatccaaccacctctctgtgcctgcaatggctcgacagcctcgatttaaccggtaaaacagtcatcgactttggctgtggttccggcattctggcgatcgcggcgctgaaactgggtgcagcaaaagccattggtattgatatcgatccgcaggcgattcaggccagccgcgataacgccgaacgtaatggcgtttctgaccgtctggaactctacttaccgaaagatcagccanaagaaatgaaagccgacgtggtggtcgctaacatccttgcaggcccattacgtgaactggcaccgttaattagcgtcctgccagtttcaggcggcttactgggcctttctggtattctggcaagccaggcggagagcgtttgcgaagcctatgccgacagcttcgctctggacccggtcgtggaaaaagaagagtggtgccgtattaccggtcgtaagaattaaccttcgcatcgccatagggtgacgcggggcgaagtgcgagcaagctcacaaaaggcacgtaaatttgccgatt

SEQ ID NO: 1518 - DNA, 2 bp, Escherichia coli
  Strain O55:H7
aa

SEQ ID NO: 1519 - DNA, 16178 bp, Escherichia coli
  Strain O55:H7
  modified_base (499)..(499): a, c, g or t
  modified_base (1007)..(1010): a, c, g or t
  modified_base (3117)..(3120): a, c, g or t
  modified_base (5408)..(5408): a, c, g or t
  modified_base (8047)..(8047): a, c, g or t
  modified_base (8617)..(8617): a, c, g or t
  modified_base (8773)..(8773): a, c, g or t
  modified_base (9726)..(9726): a, c, g or t
  modified_base (9916)..(9917): a, c, g or t
  modified_base (11876)..(11877): a, c, g or t
  modified_base (11880)..(11880): a, c, g or t
  modified_base (13663)..(13664): a, c, g or t
  modified_base (13687)..(13687): a, c, g or t
  modified_base (13705)..(13706): a, c, g or t
  modified_base (13890)..(13890): a, c, g or t
  modified_base (13940)..(13940): a, c, g or t
  modified_base (13942)..(13943): a, c, g or t
  modified_base (14119)..(14119): a, c, g or t
  modified_base (15556)..(15559): a, c, g or t
  modified_base (15978)..(15979): a, c, g or t
  modified_base (16127)..(16128): a, c, g or t
  modified_base (16144)..(16144): a, c, g or t
tcattcataaagaaaaattgagaacttactcaaatttctttgagtgtaaattttagtcactattttctaatatgatgatttttatgagtaattatcgcaccacgctcattttaaatgcaattctttgatccatctcagaggattggtcaaagtttggcctttcatctcgtgcaaaaaatgcgtaatatacgccgccttgcagtcacagtatggtcatttcttaactcatgcgcatcggacaatatcagctcagaaatcgcctgatcgcagcgcccatggctggcattacagacagaccttttcggacgttgtgctacgagatgggagccggattgacagtatccgagatgatgtcttctaacccacaggtttgggaaagcgacaaatctcgtttacggatggtgcacattgatgaacccggtattcgcaccgtgcaaattgctggtagcgatccgaaagaaatggcagatgcagcacgtattaacgtggaaagcggtgnccagattattgatatcaatatgggttgcccggctaaaaaagtgaatcgcaagctcgcaggttcagccctcttgcagtacccggatgtcgttaaatcgatccttaccgaggtcgtcaatgcagtggacgttcctgttaccctgaagattcgcaccggctgggcaccggaacaccgtaactgcgaagagattgcccaactggctgaagactgtggcattcaggctctgaccattcatggccgtacacgcgcctgtttgttcaatggagaagctgagtacgacagtattcgggcagttaagcagaaagtttccattccggttatcgcgaatggcgacattactgacccgcttaaagccagagctgtgctcgactatacaggggcggatgccctgatgataggccgcgcagctcagggaagaccctggatctttcgggaaatccagcattatctggacactggggagttgctgcccccgctgcctttggcagaggttaagcgcttgctttgnnnncacgttcgggaactgcatgacttttatggtccggcaaaagggtaccgaattgcacgtaaacacgtttcctggtatctccaggaacacgctccaaatgaccagtttcggcgcacattcaacgccattgaggatgccagcgaacagctggaggcgttggaggcatacttcgaaaattttgcgtaaacagaaataaagagctgacagaactatgttcgaacaacgcgtaaattctgacgtactgaccgtttctaccgttaactctcaggatcaggtaacccaaaaacccctgcgtgactcggttaaacaggcactgaagaactattttgctcaactgaatggtcaggatgtgaatgacctctatgagctggtactggctgaagtagaacagcccctgttggacatggtgatgcaatacacccgtggtaaccagacccgtgctgcgctgatgatgggcatcaaccgtggtacgctgcgtaaaaaattgaaaaaatacggcatgaactaattcaggttagctaattgcttgattaaaaggcgctactcggcatggggaagcgccttttttataggtgtcacaaagggagtgaccatgagaacaggatgtgaaccgacccggtttggtaatgaagctaagaccattattcacggtaatgcccttgccgaacttaaaaagctacctactgaaagcgtcgatctgatctttgccgacccaccgtataacatcggtaaaaattttgatggtctgatcgaagcctggaaagaagatctgtttatcgactggctgttagaagtgattgcagagtgccaccgcgttctgaaaaagcagggcagcatgtacatcatgaacagtacggaaaacatgccctttatcgatctccagtgccgcaagctttttaccatcaaaagtcgcatcgtctggtcatatgacagttctggagtgcaggcgaaaaaacactacggctccatgtacgaacccatcctgatgatggtgaaagacgcaaagaactacacattcaacggtgatgctattctggtagaagccaaaaccggatcgcagcgcgcgttgatcgattatcgcaaaaatcctccacagccttacaatcatcaaaaagtaccgggtaacgtctgggattttccgcgcgtgcgttatttgatggatgaatatgaaaaccacccgacgcaaaaaccggaagccttactgaaacgcattattctcgcctcttccaacccaggcgatatcgttctcgacccgtttgctggtagctttactaccggtgccgtagccatcgccagcggacgaaaattcattggtattgagatcaacagcgagtacatcaaaatggggcttcgacggctggatgtcgcgtcgcattactctgcggaagaactggcgaaagtgaaaaaaagaaagaccggcaacctgtcaaaacgaagccggttaagcgaagttgaccccgatctcattacaaagtaaaggatgtgtaagcctggtttgcagattattcatttcgtgtatatttcctgccagacttggttaaacatgcacaggctcaggtaatgattcgcaagtattggtggctcgtcgttttcgctgtcttcgtttttctgtttgatactttactgatgcagtggattgaactgctggcaacagaaacagacaaatgccgcaatatgaactcagttaatccactaaaactggttaactgtgacgaactgaattttcaggacagaatgtgaatttacatgacacttaattcattcgtttgatgaattaatttcgttatgttttcatctggcatgaacattcttaatacgttatcgaccagagcgggggcttgtttataaagatcataacccgccatattcattaaccagttttgaacaattccgctgaaggcaccatcaataataatcatcacaacatctaaatcgaggttatttgctacacaaccttgttgctgacacgcctgcaatacttcgcggagagtctgcggattaaagcccatcttttcgcgtatcactccctcggccagcatctcatcattaaattcacatttgtgatataagattttcagcaacgcctgctggcggggaattttggcaatannnngcaagccgacaatcaatttttcacgcaattgttgaaacgggtcatgctctaatccagccgtcaagtgttcctggattaactcccgcaatgaaggctgttgcaaccacatctcattaaacagttgggtcttgttctcgaagtgccagtagatagcgccacgcgtaacgttagcggcatcggcaatgtcgttgagcgtcgtcttgcttacgccatgttgcgcaaactgggcgatggcagtttcaatcagttcttgccgggtcttcagagcttcggctttggttctttttgccatgattaattattcaggaaataaatatcttcgacacagagtgagaaaatagcgaaggttaatctatcacctaatgtgtatttatacgagaggctaacattgagttgctataaatcgttaaataaataatatatattatttacttaagatacattcactacatcaatatatacttcaatttacgattttttaattctgcctctttcaacccgcgtcaaaataaaacagtagaatattaatctttttttgtgtttatgtgccttgagacgcctgtattcataactattccttacatcgacgaatgataatttgtaggatagcgaactgtatttttctttctgcgagttaacgcgttgcctttttgggtaaataacgcgcttttggttttttgaggaatagtaatgacgaaacatgccaggtttttcctcctgccctcctttattctgatctccgcggctctaatcgccggttgtaacgataagggagaagagaaagctcacgtcggtgaaccgcaggttaccgttcatattgtaaaaacggccccgttagaagttaagactgaattaccaggccgcaccaatgcttatcgtatagccgaagttcgcccacaggttagcgggatcgtactgaatcgcaatttcactgaaggcagcgatgtgcaagcaggccagtccctgtaccagatcgatcccgcgacctatcaggcaaattatgacagcgcgaaaggcgaactggcgaaaagtgaagccgccgccgccatcgcgcatttgacggtaaaacgttacgttccgctcgtgggtacgaaatacatcagccagcaggagtacgaccaggccattgctgatgctcgccaggccgatgccgccgtgattgccgcaaaagccacagtcgaaagcgctcgcatcaatcttgcttataccaaagtgactgcgccaattagcggacgtatcggcaaatcgactgtgaccgaaggcgctcttgtcactaatgggcaaacgactgaactggcaactgtccagcagctcgatcctatctatgttgatgtgacccaatccagcaacgattttatgaggctgaagcagtccgtagagcaaggaaatttgcataaggaaaacgccaccagcaacgtagagttggtcatggaaaacggtcaaacctatcccctgaaaggtacgctgcaattctccgatgtgaccgttgatgaaagcaccggctccataaccctacgtgctgtcttccctaacccgcaacatacgcttttgccgggtatgtttgtgcgtgcacggattgatgaaggcgtccaacctgacgccattctcatcccgcaacaaggcgttagccgcacaccgcgtggtgatgcaaccgtgctgattgttaacgataaaagtcaggtggaagtgcgccctgtcgttgccagtcaggcgattggcgataaatggttgattagcgaaggtctgaaatctggcgatcaagtcattgtcagcggcctgcaaaaagcgcgtccgggagagcaggttaaagccactaccgatacccccgcagatactgcatcgaagtaaggtaatctgacatggcaaacttttttattcgacgaccgatatttgcatgggtgctggccattattctgatgatggcgggcgcactggcgatcctacaattgcccgtcgctcagtatccaaccattgcaccgcctgcggtttctgtttcagcaaactatccgggcgctgatgcgcagaccgtgcaggatacggtgacgcaggttatcgaacagaatatgaacggtatcgataacctgatgtatatgtcctccaccagcgattccgccggtagcgtgacaattacccttaccttccagtccgggaccgatcctgatatcgcgcaagtgcaggtgcagaacaaactccagctcgccacgccgttgctgccgcaggaggttcagcagcaggggatcagtgttgaaaagtccagtagcagctatttgatggtggcaggctttgtntctgataacccagacaccacacaggacgatatctcggactatgtggcctctaacgttaaagatacgcttagccgtctgaatagcgtcggtgacgtacagcttttcggcgcacagtatgcgatgcgtatctggctggacgccgatctgctaaacaaatataaactgacaccggttgatgtgattaaccagttgaaggtacagaacgatcagatcgctgccggacagttgggcggaacgccagcgttaccagggcaacagttgaatgcctcgattattgctcagacgcggttaaaaaatccggaagaattcggcaaagtgaccctgcgcgtaaacagtgacggctcggtggtgcgtctgaaagatgtcgcacgggttgaacttggcggtgaaaactataacgttatcgctcgcatcaacggaaaaccggcggcgggcctgggtattaagctggcaaccggcgcgaatgctctcgataccgcgaaagccattaaggcaaaactggcggaattacagccattcttcccgcagggaatgaaggttctctacccttatgacaccacgccattcgtccagctttctattcacgaagtggtaaaaacactgttcgaagctattatgctggtgttcctggtgatgtatctgttcttgcagaatatgcgagcaacgctgatccccaccattgcggtacccgtggtgttgttagggacgtttgccatcctcgccgcttttggttactccatcaacacactaacgatgttcgggatggtgcttgccatcgggctgctcgtcgatgatgcgatagtggtggtggagaacgtcgagcgcgtgatgatggaggataagctcccgccaaaagaagcgacggaaaaatcaatgtcgcaaatacagggcgcactggtgggtatcgcgatggtgctgtcagcggtatttattccgatggcattcttcggcggttctactggggcaatttatcgtcagttctctatcaccatcgtttcggcaatggcgctttctgttctggtggcattgattcttacccctgcgttatgtgcaacactgctcaaacccacctcagctgagcatcacgaaaataagggtggtttcttcggctggtttaataccaccttcgatcatagcgttaaccactacaccaacagcgtcggcaaaatcctcggttccacaggacgatatttactgatctatgcgctgattgttgcaggaatggtggtgttgtttttacgtcttccgtcttccttcttacctgaagaggatcagggtgtctttctgaccatgattcagttacccgctggcgcgacgcaagagcggacgcaaaaagtgttggatcaagtgacggattactatctgaagaacgagaaagcaaacgttgaaagtgtctttacggttaacggctttagcttcagcggccaggcacaaaacgccggtatggccttcgtcagtctgaaaccgtgggaagagcgtaatggtgatgaaaacagtgcggaagcggtaatccatcgtgccaaaatggagttgggcaagatccgcgacggttttgtcattccattcaatatgccagccattgttgaactgggcacggcaacgggtttcgactttgagttaattgataaggctgggctgggtcacgatgccctaacccaggcccgtaaccagttgcttggtatggcggcgcaacatcctgccagcttagtcagcgtgcgtcccaatggcctggaagacaccgcgcagtttaaactggaagttgaccaggaaaaggcgcaggcattaggtgtttcactttctgacatcaatcagaccatttcaacggcgttgggtgggacttacgttaacgacttcatcgaccgtggtcgcgtgaaaaaggtgtatgttcaggcggatgccaaattccgtatgctgccagaagatgtcgataaactttatgtccgcagcaccaacggcgaaatggtgccattctctgcctttaccacttcacattgggtgtatggctctccgcgactggaacgctacaacggtctgccgtcaatggagattcagggggaagccgcgccaggaaccagttccggcgatgccatggcgttgatggaaaacctagcgtcaaaattacctgcgggcattggttatgactggacgggtatgtcgtatcaggaacgcttatcgggaaaccaggctcccgctctggtagcaatttcctttgtggttgttttcctgtgccttgctgcactctatgaaagctggtcaattcctgtctcggttatgttggtcgtgccgttagggattgtcggcgtgctgctggcggcgacactctttaatcaaaaaaatgacgtctactttatggtaggcttgctaacgacaattggcttgtcggccaaaaacgctattttgattgttgagttcgctaaagatctcatggagaaagagggtaaaggtgttgttgaagcgacactaatggcagtacgtatgcgtctgcgtcctatcctgatgacctctctcgcctttattctcggcgtattaccgctggctatcagtaacggtgccggcagtggcgcgcagaacgcagtgggtatcggggtaatgggaggaatggtctctgcaacgttgctggcaatcttcttcgtaccggngttctttgtggtgatccgccgttgctttaaaggataaatctgaaacataaaggcgctttcgggtgcctttatgttttccagtgaaacccataaaaattaataagatattcttttgctcactctttaaaagctttctatagctcccgctcccttcactatttttacaattcacataatttgtcattattcattccgcaagatttataacctccggtgataaaatggcattcagctcgttaataagagagttaacttattaagcgttagcgtttattactgaggtaacaccatgaaaagattaattcctgtggcattgctcaccgcattgctggcgggctgtgctcacgattcgccctgcgttccggtttatgacgatcagggtcgtctggttcacaccaatacctgtatgaaaggcacgactcaggataactgggaaacggctggggctattgctggcggggcagcggctgttgctggcctgacgatggggatcatcgctctgtcgaaataactgaacagggcgcggagtttcgcgctctgtttaacgatacagtatctttacataagatnaaatattgctatattctgctggctaattctctgctgatttagcatgttatatcgtgttatttcgctgctttcgaaataacgcatcaatttaactttcgcacttcccaccagaaatatactcacgctaacaatcattattctgcttagtaaaacacncgtaaatgttttgcgccaaaatgtggcgcatgtttcattttcgcaccattgcggggcgctgtttttattatttcctgtctacactcagcttattgcgacgcgaaatcgtgcgcaaaagctggcactacttttgcttataagaggatggccacagacaggcaaaagacgtttcccaaacgtcctataacgataattttcgcctcacaggaagcattatgaaaaagatgatgatagccacactggctgccgccagcgtgctgcttgccgttgcaaatcaggcgcatgctggcgcgacgcttgatgccgttcagaaaaaaggttttgtgcaatgcgggatcagtgatggattacctgggttctcttatgccgatgcagacggtaagttttcaggtattgatgttgatgtttgtcgtggtgttgccgctgctgtatttggtgacgacacgaaagtgaaatataccccactcacagcaaaagaacgcttcacggctttacagtcaggggaagtggatttgctctcccgtaatacgacctggacttcatctcgcgatgccgggatgggaatggcatttactggcgtcacttattacgacggcattggcttcctgacgcacgataaagcggggctaaaaagcgcgaaagaactggatggcgctaccgtctgtattcaggcgggtactgataccgaactcaacgtcgccgactatttcaaggcaaacaatatgaagtacacaccagtgactttcgatcgttctgacgaatcagcgaaggcactggaatccggtcgctgcgatacgctggcttcggatcaatcccaactgtatgccctgcgcatcaaattaagcaacccggctgaatggattgtcttaccggaggttatctctaaagaaccgcttgggccggtagttcgtcgtggcgatgatgaatggttctcgattgtacgctggacgctnttcgccatgctaaatgctgaagagatgggcatcaattcccagaacgtcgatgaaaaagcggctaatccagcaacgcctgatatggcacatctgctgggtaaagaaggcgattacggcaaggatctgaagttggataataaatgggcctataacatcatcaaacaggtgggtaactactcggaaattttcnngcgtaacgtaggttcagaaagcccgctgaaaattaaacgtgggcaaaataatctctggaataacggcggtattcagtacgcaccgcccgtgcgttaagtcggtgtgaggtaacgagcgtcgctacggcggcgctctcttcagcgttatgctttccgaggtttctatgtctcatcgccgctcaaccgttaaaggctcactctcttttgccaaccctacggttcgcgcctggttattccagatccttgccgttgttgctgttgtcggcattgttggttggttatttcacaacactgtaacgaatctcaataatcgtggcattacttcaggttttgcctttctggatcgcggcgctggcttcggtattgtccagcatttgatcgattaccagcagggcgacacctacggacgcgtttttattgtcggcttactcaatacgctactggtttctgcattgtgtattgtgttcgcttctgttttgggcttctttatcggtctggcgagactttcggataactggctgctacgaaagctttccacaatttatattgagatcttccgtaatattcccccgctgctgcaaatcttcttctggtactttgccgtgttgcgcaatttgcccggaccacgccaggctgtgagcgcgtttgatctggcctttttgagcaatcgtgggctttatattccgtcaccgcagctgggagacggatttattgcgtttatcctggctgttgttatggctatagtcctttctgttgggctattccgctttaataaaacataccagataaagaccggacagctgcgccgcacctggcccatcgccgcagtgttgatcatcggtttgcctttactggcgcaatggctttttggcgcagcactacactgggatgtcccagccctacaaggctttaacttccgcggcgggatggttttaattcctgaactggcagccttaacgctggcactttcggtttatacctctgcatttatcgccgagattatccgcgcggggatccaggcagtgccttatggtcaacatgaagcggctcggtcactgggattacccaacccggttacgctacgccaggtcattattccccaggcactgcgggtgattattccaccgttaaccagccagtatctcaacatcgtcaaaaactcctctcttgccgccgctattggctatcccgatatggtttcgctgtttgctggcaccgtgctgaaccagacggggcaagccatcgagacgatagccatgaccatgtcggtctatctgattatcagcctgactatctcgctgctgatgaatatctataaccgccgcatcgcgatcgtggaacgctaaggagtcatgatgacaaaagtattgctgtctcatccctcgcgcccggcgagccataactcaagccgcgcgatggtgtgggtgcgaaaaaatctgttctccagctggagcaatagcctgctgactattggctgcatatggttgatgtgggaactgatcccaccgttgctgaactgggcatttttgcaggctaactgggttggctcaacgcgtgccgactgcacaaaagccggtgcctgttgggtcttcatccacgaacgatttggtcagtttatgtatggactttacccacacgaccaacgctggcgaattaacctggcattactgattggccttgtgtcaatcgcaccaatgttctggaaaatactcccgcatcgcggtcgctatattgcggtctgggcagtgatttacccactgattgtctggtggctgatgtatggcggtttttttgctcttgagcgggttgaaacccggcaatggggcgggctgacgctaactttaattattgcatcagttgggattgcgggggcgctaccgtgggggatcttactggcgttaggtcgccgctcccatatgccgattgtgcgtatcttatcggtcatttttatcgaattcnngcncggcgtgccgctgattaccgttctgtttatgtcttcggtcatgctgcctttgtttatggcagaaggcaccagtatcgacaaactgatccgcgcgctggttggcgtgatcctgtttcagtcagcatatgttgcggaagtcgtgcgaggtggattacaggcgctgcctaaagggcaatatgaagcggcagagtcgctggcgttgggttactggaaaactcaggggctggttattctgccacaggcgttgaagctggtaattcctgggctggtaaataccatcatcgcactcttcaaagataccagcctggtgatcattatcgggttgttcgatcttttcagtagcgttcagcaggcaaccgttgatcccgcctggttgggtatgtcgacggaagggtatgttttcgccgcgctgatctactggatcttctgtttcagcatgtcgcgctatagccagcatctggaaaaacgttttaacaccgggcgtacaccgcattgaggacactatgagccaaattttactgcaacctgctaacgcgatgattacgctggaaaacgtcaataaatggtatggacaattccatgttttgaaaaatataaatttaaccgtgcaaccgggagaacggatcgttctgtgtggcccttcaggttccggtaaatcgacaaccattcgttgtattaatcatctggaagaacatcaacagggacggatcgtggtagatggcatcgaacttaatgaagatatccgcaatattgagcgcgtcaggcaggaagtgggaatggtctttcagcatttcaatctcttccctcatctgaccgttctacagaactgtaccctggcaccgatttgggtacgcaagatgccaaagaaagaggctgaagctctggcgatgcattaccttgagcgggtgagaattgccgaacatgcgcataagtttcccggacagatttcaggtggtcagcagcaacgcgttgccattgcgcgctcgctgtgtatgaagccgaaaattatgttgtttgatgagcccacatcggcgctcgatccggagatggtgaaagaggtgctggatacgatgattgggctggcgcaatcgggtatgacaatgttgtgtgtaacccatgagatggggtttgcgcgaaccgtcgctgaccgggtgatttttatggatcgtggcgaaatagtggagcaagctgcaccggatgagttttttgcgcatcctagtcagagcgtacgagggcatttttatcgcaggtaatccattaattgaatgttagttcgaaaagcataaaggccatcctttcggatggcctttcgcttgatttgatgtctggcagtttatggcgggcgtcctgcccgccaccctccgggccgttgcttcgcaacgttcaaatccgctcccggcggatttgtcctggttgggagagtgttcaccgacaaacaacagataaaacaaaaggcccagtcttccgactgagccttttgttttatttgatgtctggcagttccctactctcgcatggggagtccccacactaccatcggcgctacggcgtttcacttctgagttcggcatgaggtcaggtgggaccaccgcgctactgccgccagacaaattcttttctaatctgccgaactttaacctaaaaagtggtgctgatacccagagtcgaactggggacctcacccttaccaagggtgcgctctaccaactgagccatatcagcacgctttatttgatgcctggcagttccctactctcgcatggggagaccccacactaccatnngcgctacggcgtttcacttctgngttcggcatggggtcagnngggaccaccgcgctacggccgccaggcaaattctgttttatcagaccgcttctgcgttctgatttaatctgtatcaggccgaaaatcttctctcatccgccaaaacaccttcggcgttgtaaggttaagcctcacggttcattagtaccggttagctcaacgcatcgctgcgcttacacacccnggcctatcaacgtcgtcgtcttcaacgttccttcaggacccttaaagggncnngagaactcatctcggggcaagtttcgtgcttagatgctttcagcacttatctcttccgcatttagctaccgggcagtgccattggcatgacaacccgaacaccagtgatgcgtccactccggtcctctcgtactaggagcagcccccctcagttctccagcgcccacggcagatanggaccgaactgtctcacgacgttctaaacccagctcgcgtaccactttaaatggcgaacagccatacccttgggacctacttcagccccaggatgtgatgagccgacatcgaggtgccaaacaccgccgtcgatatgaactcttgggcggtatcagcctgttatccccggagtaccttttatccgttgagcgatggcccttccattcagaaccaccggatcactatgacctgctttcgcacctgctcgcgccgtcacgctcgcagtcaagctggcttatgccattgcactaacctcctgatgtccgaccaggattagccaaccttcgtgctcctccgttactctttaggaggagaccgccccagtcaaactacccaccagacactgtccgcaacccggatcacgggtccacgttagaacatcaaacattaaagggtggtatttcaaggtcggctccatgcagactggcgtccacacttcaaagcctcccacctatcctacacatcaaggctcaatgttcagtgtcaagctatagtaaaggttcacggggtctttccgtcttgccgcgggtacactgcatcttcacagcgagttcaatttcactgagtctcgggtggagacagcctggccatcattacgccattcgtgcaggtcggaacttacccgacaaggaatttcgctaccttaggaccgttatagttacggccgccgtttaccggggcttcgatcaagagcttcgcttgcgctgaccccatcaattaaccttccggcaccgggcaggcgtcacaccgtatacgtccactttcgtgtttgcacagtgctgtgtttttaataaacagttgcagccagctggtatcttcgactgatttcagctccatccgcgagggacttcacctacatatcagcgtgccttctcccgaagttacggcaccattttgcctagttccttcacccgagttctctcaagcgccttggtattctctacctgaccacctgtgtcggtttggggtacgatttgatgttacctgatgcttagaggcttttcctggaagcagggcatttgttgcttcagcaccgtagtgcctcgtcatcacgcctcagccttgattttccggatttgcctggaaaaccagcctacacgcttaaaccgggacaaccgtcgcccggccaacatagccttctccgtccccccttcgcagtaacaccaagtacaggaatattaacctgtttcccatcgactacgcctttcggcctcgccttaggggtcgactcaccctgccccgattaacgttggacaggaacccttggtcttccggcgagcgggcttttcacccgctttatcgttacttatgtcagcattcgcacttctgatacctccagcatgcctcacagcacaccttcacaggcttacagaacgctcccctacccaacaacacannnntgtcgctgccgcagcttcggtgcatggtttagccccgttacatcttccgcgcaggccgactcgaccagtgagctattacgctttctttaaatgatggctgcttctaagccaacatcctggctgtctgggccttcccacatcgtttcccacttaaccatgactttgggaccttagctggcggtctgggttgtttccctcttcacgacggacgttagcacccgccgtgtgtctcccgtgataacattctccggtattcgcagtttgcatcgggttggtaagtcgggatgacccccttgccgaaacagtgctctacccccggagatgaattcacgaggcgctacctaaatagctttcggggagaaccagctatctcccggtttgattggcctttcacccccagccacaagtcatccgctaanntttcaacattagtcggttcggtcctccagttagtgttacccaaccttcaacctgcccatggctagatcaccgggtttcgggtctataccctgcaacttaacgcccagttaagactcggtttcccttcggctcccctattcggttaacnntgctacagaatataantcgctgacccattatacaaaaggtacgcagtcac

SEQ ID NO: 1520 - DNA, 543 bp, Escherichia coli
  Strain O55:H7
  modified_base (168)..(169): a, c, g or t
  modified_base (245)..(246): a, c, g or t
  modified_base (250)..(251): a, c, g or t
  modified_base (279)..(279): a, c, g or t
  modified_base (360)..(361): a, c, g or t
  modified_base (537)..(537): a, c, g or t
  modified_base (542)..(542): a, c, g or t
cgtacacggtttcaggttctttttcactcccctcgccggggttcttttcgcctttccctcacggtactggttcactatcggtcagtcaggagtatttagccttggaggatggtccccccatattcagacaggataccacgtgtcccgccctactcatcgagctcacannatgtgcatttttgtgtacggggctgtcaccctgtatcgcgcgcctttccagacgcttccactaacacacacactgnntcannctctgggctcctccccgttcgctcgccnctactgggggaatctcggttgatttcttttcctcggggtacttagatgtttcagttcccccggttcgcctcattaacctanngattcagttaatgatagtgtgtcgaaacacactgggtttccccattcggaaatcgccggttataacggttcatatcaccttaccgacgcttatcgcagattagcacgtccttcatcgcctctgactgccagggcatccaccgtgtacgcttagtcgcttaacctcacaacccgaanatgtnt

SEQ ID NO: 1521 - DNA, 1071 bp, Escherichia coli
  Strain O55:H7
  modified_base (5)..(5): a, c, g or t
  modified_base (28)..(29): a, c, g or t
  modified_base (33)..(34): a, c, g or t
  modified_base (257)..(260): a, c, g or t
  modified_base (394)..(394): a, c, g or t
  modified_base (766)..(766): a, c, g or t
  modified_base (913)..(913): a, c, g or t
ttgcnaaaatttgagagactcacgaacnncttnngttgttcagtgtttcaattttcagcttgatccagatttttaaagagcaaaacttcgcagtgaacctttgcaggtacactctgaagtattttttatttaatcactacagagatggtggagctatgcgggatcgaaccgcagacctcctgcgtgcaaagcaggcgctctcccagctgagctatagccccataacatgtagttaaaacctcttcaaatttgccgtnnnnatttggtaggcctgagtggacttgaaccaccgacctcacccttatcaggggtgcgctctaaccacctgagctacaagcctgtagaggttttactgctcattttcatcagacaatctgtgtgagcactgcaaagnacgcttctttaaggtaaggaggtgatccaaccgcaggttcccctacggttaccttgttacgacttcaccccagtcatgaatcacaaagtggtaagcgccctcccgaaggttaagctacctacttcttttgcaacccactcccatggtgtgacgggcggtgtgtacaaggcccgggaacgtattcaccgtggcattctgatccacgattactagcgattccgacttcatggagtcgagttgcagactccaatccggactacgacgcactttatgaggtccgcttgctctcgcgaggtcgcttctctttgtatgcgccattgtagcacgtgtgtagccctggtcgtaagggccatgatgacttgacgtcatccncaccttcctccagtttatcactggcagtctcctttgagttcccggccggaccgctggcaacaaaggataagggttgcgctcgttgcgggacttaacccaacatttcacaacacgagctgacgacagccatgcagcacctgtctcacngttcccgaaggcacattctcatctctgaaaacttcygtggatgtcaagaccaggtaaggttcttcgcgttgcatcgaattaaaccacatgctccaccgcttgtgcgggcccccgtcaattcatttgagttttaaccttgcggccgtactccccaggcg

SEQ ID NO: 1522 - DNA, 1155 bp, Escherichia coli
  Strain O55:H7
ccggaagccacgcctcaagggcacaacctccaagtcgacatcgtttacggcgtggactaccagggtatctaatcctgtttgctccccacgctttcgcacctgagcgtcagtcttcgtccagggggccgccttcgccaccggtattcctccagatctctacgcatttcaccgctacacctggaattctacccccctctacgagactcaagcttgcagtatcagatgcagttcccaggttgagcccggggatttcacatctgacttaacaaaccgcctgcgtgcgctttacgcccagtaattccgattaacgcttgcaccctccgtattaccgcggctgctggcacggagttagccggtgcttcttctgcgggtaacgtcaatgagcaaaggtattaactttactcccttcctccccgctgaaagtactttacaacccgaaggccttcttcatacacgcggcatggctgcatcaggcttgcgcccattgtgcaatattccccactgctgcctcccgtaggagtctggaccgtgtctcagttccagtgtggctggtcatcctctcagaccagctagggatcgtcgcctaggtgagccgttaccccacctactagctaatcccatctgggcacatccgatggcaagaggcccgaaggtccccctctttggtcttgcgacgttatgcggtattagctaccgtttccagtagttatccccctccatcaggcagtttcccagacattactcacccgtccgccactcgtcagcaaagaagcaagcttcttcctgttaccgttcgacttgcatgtgttaggcctgccgccagcgttcaatctgagccatgatcaaactcttcaatttaaaagtttgatgctcaaagaattaaacttcgtaatgaattacgtgttcactcttgagacttggtattcatttttcgtcttgcgacgttaagaatccgtatcttcgagtgcccacacagattgtctgataaattgttaaagagcagttgcgacgcggctttcagctcactgtcgcgaggtggcgtatattacgctttcctctttcagagtcaaccctgaatttcaggattttttctcttcgttgttacgaccatcttgtgaagtgtttcacgttgtcgtctcaacggaggcgcattat

SEQ ID NO: 1523 - DNA, 10506 bp, Escherichia coli
  Strain O55:H7
  modified_base (3614)..(3614): a, c, g or t
  modified_base (4856)..(4856): a, c, g or t
  modified_base (6692)..(6692): a, c, g or t
  modified_base (8240)..(8240): a, c, g or t
  modified_base (9889)..(9889): a, c, g or t
ttttgcacaagtacttttttgatctttttttctgtttgttgttttttcaccctttttgctgcattcgcacacaaaacggtgcttttttgcatactaaaagacttgcacaaggccaataatgcccccaaagtcattagtaaatcatttattgctgaggtaagtatgtctgatgttttacgcccataccgcgatctttttccacaaatcggtcagcgcgtaatgatcgacgatagcagtgtcgtgattggtgacgttcgtctggctgatgatgtggggatctggccgctcgttgtgattcgtggagatgtacattatgtacagatcggagcacgcaccaatatccaggatggcagtatgttgcatgtcactcataaatcctcgtacaacccagatggcaacccattaaccattggcgaagatgtcactgttggtcacaaggtgatgctccacggctgcaccattggcaatcgagttttggttgggatgggctcaattttacttgatggcgcaatagtagaagatgatgtgatgattggtgcgggtagtctggtcccacaaaataaacggctggagagcggatatctgtatctcggtagtcccgtcaaacagatccgcccgttaagtgatgaagagaaggctgggttacgctattccgcgaataattacgtgaaatggaaggacgaatatctggatcagggtaaccagacccagccttgatcatcttcactttgttcctgaattaagttttccgcttcttcttccaggtcccagcgatgctgacgaaaactcgctaaccactgctctggcgtatctcctgtaaagcgatacgccaggctatcgccagagatcgcacatgtcagttgcatgccattcacgagagcgggaaaacatacacattttttattctcgacccactcttctctgtccggaaactggatggcctgattcacgcggacaattcctcctgcaattgctttataactggttctacatcaggcagaacgccatgccaaagaaggaaggcatgagccgcctgtgccaccagcattcctaaaccatcagcagtaggctttgagcctcgctgctcacaccatgccaaaaaaggagtttttcctttctgatagaacatgtcatagcaataaatgcctggatgaatgagcgatgacgggatcgccggaatatcaccactgatgccactggatgtggcattaataatgagatcaaactcatgaccttccagttcgtccatacccaacgcctgaatactgccagtgtgcgcaaacaatttagccaactcttccgctcgggataccgtccgattagtgattgtcaccgcacagtccagggaaagaagtggcagtagtacgccgcgagatgctccacctgcgccgatgagcagaatacgtaaaccaggacggataaaagacagacgttccagatcgcttaacaagcctacaccatcggtattgtcacccagcaagcgtccatcttctaaccgcttgagggtgttaacagcaccagccaacgctgcgcgttcagtaagctcatccgctctggcaaaagcctcttctttaaaaggcaccgtcacattcgcacctttaccaccagcactaaagaaagcgttcagtgtgttgacgaaatcattgatgggtgccaacacgcgcccatagggatgttcaatattcagttgctgagcaaattgctgatgaatgaatggcgatttgctgtgggctatcggattaccaaaaacagcataggtttccattatgttacccctgtcgaaacagttcacccgtcagggcatcgcggatttctgaaggatttaaacgcccccccgtttcaccaggcacaaccgggaacgccgcgccaaattgtgcgcgaacttcgtctactgttcgacaaggtggcaatccactcaagttggcactggtagaaaccagcggtttaccataagcctggcacaaagcaaccaccaacggatggtcggtgactcgtacagcaagcgaatcaaagcggcccgtcaaccagcgcggtgttgtcgcaggcgcgggaaagacaaaggtgacaggacctggccagcgggaaaaaatggtttcacgctgcacgtcagtcaacatggtgtcatcaatatagggtttaagctgctcgtaatttgctgcgattaaaatcagccccttatcaaccggacgctgttttaactccaacagtcgcatcactgctgtttcgctatcaggatcgcacccaacaccgaaaacggcttccgttggataggcgatgacacgttcttcattgagaacatctatcgcagctgcgatagcgtctccttgcaggttattattcacgttattattccgccgaaaccggctttccacattgtttactggcacaaaagtgttttacaccctgcgcggttttcttttcgatgagtagcggataatgacactcagggcattctccagctatgggtttgaagttaatggcaaattgacactccgggtagcgatcacaggagtgaaatgttttgccataacgggagcggcgctggaccagatggcccgtccggcattggggacatgtaattgctgtttcgtccggtttatcgataagttcggtatgttcgcattcagggtagttaatgcaaccaataaacataccaaagcgtccctggcgtaataccagatttgcgccacatgcagggcaaacctgcccctccagaactttgacgatatgtccatccgctgaagatttcagaggacggacgtagtcacacgccggatactgtgagcatccaagaaacggaccgtgtttcccggatcgaataaccagttcagccccgcactttgggcaggactcattattacgcaccgtgaacagtgctgatttcgccataacaacttatgctgaattaaagaaatgattaatgcagcataccttcattcacttcaaagagtaattcttccatttgctggtacgcattttcgcagcccggaatattgaacaacaccatcaggattacccatttcaggtcttccaggtcgaactctgcggtatccagcgcgagcactcgctctatcaccatttcacgggtttcaaggttaagcacctgaatttgctcaaggaaaagcagaaaaccacgacagctggcatccagtctttcacactcctcaggggtataaatacgcatggagagtggatcagaggccagttgcatcggttctgtcagtccttcctgataatccgcaagcttttccagccaaagcagggcattgtagatatcttctcgatcaaatcctgcgtcggtaagatcctgttcaagtttgtcttgatccacacgcaactcagcttctgtgtgaatataggtttcaaacaaatacattagtacgtcgaacatggcatgccctcctcaatcggacatagccgccgggtacagctgcgatccatcctgctaactccagttcgagtagttgagtaactacctctggcacaggttggccggcacgttcagcgacgacgtcaacaggtgttacctcatctcctacgttagccaggagctcaggaaatggcaatgccacgtcttcctgatctggtgaataaaatgaattttcaggggcgtntggcaaccagtgcaatccaaattgcaagttttccagaatttcttccggttccgtcacaagaatcgcaccttgttttattaaccagtgaggcccttcgcttcccggattccctattggacctggcaaggcaaaaacttctcgcccctgctcaagcgcacaacgtgctgtcaccagcgaaccactacgcaaagccgcttccaccaccagtacacctttacttagaccactgataatgcgatttcttcgtgggaaattgtaagcaaggggtggaacatcgaggggaaattccgagacgagagcgcccccctgttcaagcagactggcagccagtcgggcatgacggcggggatgaatggtattaagtccattccccaatacagcaatgctgacgccatttacctgtaaggctgctttatgcgctacaccatcgattccacgcgccagtccactcgtaattgtcgctccatgcttcgccagagtttcgcaaaataatcgtccccatcgctcgccataccatgaatgcgcccgactccccactacggcaagctgaaatgaatgcagcgcgtgcagttctccttcaacaaacagtgcaccggggtaatctgtcgtcgccagaagttgaggaggataaaattcgctgtccgcagggattaaatgatggttggattgctccaaccaacaaagtgagctttcgatactcttccgcggaaatgaaagaaagcgttgtgcctgccgcaatgtaagccctgtttgctgcaatacaaccgcatcaatatgcgactgtcttgccagccagtgagctatacggaccatatcatcgccgtacaagctgctgatactcattaaacgcagccaaatttctgtatcgaccatccttatctccctgccataagcagccttagcaatctttgcgattggtcagtgatgctgtcaatcagagggggatttgtctagaatagaagaaataatctttctaactcctgaacacatctctggagatttatgtcagttttgcaagtgttacatattccggacgagcggcttcgcaaagttgctaaaccggtagaagaagtgaatgcagaaattcagcgtatcgtcgatgatatgttcgagacgatgtacgcagaagaaggtattggcctggcggcaacccaggttgatatccatcaacgtatcattgttattgatgtttcggaaaaccgtgacgaacggctggtgttaatcaatccggagcttttaganaaaagcggcgaaacaggcattgaagaaggttgcctgtcgatccctgaacaacgtgctttagtgccacgcgcagagaaagttaaaattcgcgccctggaccgcgacggtaaaccatttgaactggaggcagatggtctgttagccatctgtattcagcatgagatggatcacctggtcggcaaactgtttatggattatctgtcaccgctgaaacaacaacgtattcgtcagaaagttgaaaaactggatcgtctgaaagaccgggcttaaggataagaactaacgtgtcagaatcactacgtattatttttgcgggtacacctgactttgcagcgcgtcatctcgacgcgctgttgtcttctggtcataacgtcgttggcgtgttcacccagccagaccgaccggcaggacgcggtaaaaaactgatgcccagcccggttaaagttctggctgaggaaaaaggtctgcccgtttttcaacctgtttccctgcgtccacaagaaaaccagcaactggtcgccgatctacaggctgatgttatggttgtcgtcgcctatggcttaattctgcctaaagcagtgctggagatgccgcgtcttggctgtatcaacgttcatggttcactgctgccacgctggcgcggtgctgcaccaatccaacgctcactatgggcgggtgatgcagaaactggtgtgaccattatgcaaatggatgttggtttagacaccggtgacatgctctataagctctcctgcccgattactgcagaagataccagtggtacgctgtacgacaagctggcagagcttggcccacaagggcttatcaccacgttgaaacaattggcagacggcacggcgaaaccagaagttcaggacgaaactcttgtcacttacgccgagaagttgagtaaagaagaagcgcgtattgactggtcactttcggcagcacagcttgaacgctgcattcgcgctttcaatccatggccaatgagctgggtggaaattgaaggacagccggttaaagtctggaaagcatcggtcattgatacggcaaccaacgctgcaccaggaacgatccttgaagccaacaaacaaggcattcaggttgcgactggtgatggcatcctgaacctgctctcgttacaacctgcgggtaagaaagcgatgagcgcgcaagacctcctgaactctcgtcgggaatggtttgttccgggcaaccgtctggtctgatagtccactcttctaagcccggtcttgccgggcatttttatacttatgaaaaaacaacgtaatttacgtagcatggcggcccaggccgttgaacaagtcgtcgagcaagggcaatcattaagcaacattctgccaccgctccagcaaaaagtttccgataaagacaaagcacttcttcaagagttgtgctttggcgtactgcgtacgctttcgcagttagactggctgattaataagtcaatggcccgtccgatgaccggcaaacagcggaccgtgcattacctgattatggttggtttgtatcaactgctttatacccgcattccacctcatgctgcgctggctgaaacggttgaaggcgctatcgcaattaagcgtccgcaacttaaagggttgattaacggtgtattacgccagttccagcgtcagcaagaagagttattagccgagtttaataccagtgatgcacgttatctgcatccttcctggttgctgaagcgtctgcaaaaagcgtatccagagcagtggcaatccatcgtcgaagccaataaccagcgtccgccaatgtggctgcgtattaatcgtacgcatcattcccgcgacngctggcttgcattgctggatgaagcaggaatgaaaggtttcccgcatgcggattaccctgatgctgtacggctggaaacacctgcacctgttcatgcgctacctggttttgaagacggatgggttaccgttcaggatgcatcagcacaaggttgcatgacctggcttgcgccacaaaacggtgaacacattctggatctttgtgccgcccccggcggtaaaacaacgcatatccttgaagtggcaccagaagcgcaggttgttgcggttgatattgacgaacagcgcctctctcgcgtttacgacaatttaaaacgccttggtatgaaggcaaccgtgaaacaaggtgatggccgttacccttcccaatggtgtggcgagcaacagtttgatcgcattttattagatgcgccttgttcagcaaccggtgtgattcgtcgccatccggatattaaatggttacgtcgcgatcgcgatatcccagaactcgcgcaattgcagtctgaaattctcgacgccatttggccgcatttaaaatccggtggaaccctggtctatgccacctgttcggtgttaccggaagagaatagcctgcagattaaagcctttttgcaacgtaccgctgatgccgaactttgcgaaacaggaacaccagagcaaccgggtaaacaaaatctgcctggtgccgaagagggcgacggcttcttttacgctaagctaatcaaaaagtgatgagataacgggtcgcgactgatgaaaattatcattctgggtgccggccaggttggcggcacactggcggaaaacctggttggcgagaacaacgatatcactgttgtcgataccaacggtgagcgtctgcgaaccttgcaggataaatttgacctgcgagtcgtgcaggggcatggctctcatccacgcgtattgcgggaggcaggtgccgacgacgccgatatgctggttgctgtaaccagttcagatgaaaccaatatggttgcctgccaggtagcctactcacttttcaacacccctaatcgcatcgctcgtatccgctcaccagactacgtacgcgatgccgataagctatttcattcagatgctgtaccgattgatcatctgatcgcaccagagcagttggttatcgataatatttaccgactgattgagtatcccggcgcattgcaggtggtgaacttcgctgagggtaaagtcagcctcgctgtggttaaagcctattatggcggcccgctgattggtaatgcactttcgaccatgcgcgaacatatgccacatatcgatactcgtgtggcagcaattttccgccacgatcgccccattcgtccgcaaggttcgaccattgttgaggctggtgatgaagtgttctttattgccgcttcacagcatatccgcgcggtgatgagtgaattacagcgactggaaaaaccgtataagcggatcatgctggttggtggcggtaatatcggtgcagggctggcgcgtcgtctggaaaaagattacagcgttaaactcatcgaacgtaatcagcagngcgctgccgaactggcggaaaagttgcagaatacgatcgtcttttttggtgatgcgtcggatcaagaactgctggccgaagaacatatcgatcaagttgatctgtttattgccgtcaccaacgatgacgaggccaatatcatgtccgccatgcttgccaaacgtatgggtgcgaaaaaggtgatggtattgatccagcgtcgcgcttatgtggatctggttcaggggagcgtgatcgatattgcgatttcaccacaacaagcaactatttctgcgttgcttagccatgtgcgaaaagcagatattgttggtgtttcctcattgcgccgcggcgtagcagaagctattgaagccgttgctcacggtgatgaaagcacctcacgcgttgtcggcagagtcattgacgaaatcaagctaccgccaggaacgattattggagcggtggtacgtggaaacgacgtgatgattgccaatgacaatctgcgcattgagcaaggcgatcacgtaattatgttcctcacagataaaaaatttattaccgacgtcgaaagactcttccagccaagccctttcttcttgtaattaataaggcgtctaatgacgccttattatttccctttgattatcaaggattaattaaattcattcctagcaggaaaatggcttaacatttgttagacttatggttgtcggcttcatagggagaataacatgagcattattaaagaatttcgcgaatttgcgatgcgcgggaacgtggtggatttggcggtgggtgtcattatcggtgcggcattcgggaagattgtatcttcactggttgccgatatcatcatgccaccactgggcttattaattggcgggatcgactttaaacagtttgctgtcacgctacgcgatgcgcagggggatatccctgctgttgtgatgcattacggtgtcttcattcaaaacgtctttgattttctgattgtggcctttgccatctttatggcgattaagctaatcaacaaactgaatcggaaaaaagaagaaccagcagccgcaccagcaccaactaaagaagaagtattactgacagaaattcgtgatttgctgaaagagcagaataaccgctcttaacaagcccctgaaagcagaagaccagtggtaaaaaagtgatttactttcttgccactggcctcccagttcccccgattgccatgttttccttttcgcatgtaactgcctttccccttcttatttttctctacgcgctgtcggaataagggatcatgtagtaatgcttctatcgcattatcctttatctgccctttagtatgctgatatcggctcataaaaactccagttggttatttaacggcgtgagtgtaatcctgccagtgcaaaaaatcaacagccactcttaacgccactcgccccttgttcaagagcttcaagaatcgagcaataaacactgctatgggcggtcccacaacaggcatcgttaaggcgttgcaaggaacgctgcatactctgcaactcggctatccgtgcttcgacttcctgcaatctttcctgcacaatgccttttgactcctgacaggtatggtgttcaggatcgatacggatcgacagcaactcgcggatcgactccagactgaaacctanttgtctggcatggcggataaatttcaatcgctggagatcgctttcggtatacaggcgaaacccaccttcggtacgcacttcatgctccatcatctgctgcttttcgtaataacgaatcgtgtcgggtgttacttccgccatttttgccagctcaccaatgcgatacatacatactccactagttatcgttgattttattcaacaacttgtcagcataatcgccgcgtaaaaaatcggtactcaatccagcttgtcgcagcttcaattccagtaatgacaatcgacggctaacctcttgatattgcggatcatcgtgacggatacctttgaggatatccagaagctggattgcttccctccgttgctcaagttctggcggtaagcaaccggcattcttcagcaagcgataccccgcacgtaattccggtggcacatgagaatcatcatccagtatcaatggttcgccgctacctgccaggttatcaaactcacctttcgcttgcgcttctgctatatggcgctctgcccactggtcaagtaaccacataaatactccaggggatgaacaaaaagagtacagctattgtagataagtggggatgctacgggtataaaaa

SEQ ID NO: 1524 - DNA, 15404 bp, Escherichia coli
  Strain O55:H7
  modified_base (9784)..(9784): a, c, g or t
  modified_base (10910)..(10910): a, c, g or t
  modified_base (14431)..(14431): a, c, g or t
  modified_base (15129)..(15132): a, c, g or t
ggcgggtttttttacgttgcttcagattactctgcagcagcttctgctttctctgaacgatcaaccagctcgatgtaagccatcggcgcgttgtcgcctgcacggaagccacacttcagaatacgagtgtaaccaccggcacggctcgcgaaacgcgggcccagttcgttaaacagttttgccacgatctcgttatcacgagtacgggcgaatgccagacgacgattagcaacgctatcagtcttggcaagagtaatcagcggctcaactacgcggcgcagctctttcgctttaggcagagtcgtcttgatgatttcatgacgaaccagtgaacctgccatattgcggaacatagcctggcgatggctgctgttgcggttcagttgacgaccactcttacgatggcgcatgaccttatccttctcagtaaaaccttaacctgtgatccggttactcgtcagcgatgcttgccggtggccagttttccaggcgcatgcccagagacagtccacgggaagccagcacgtctttaatctcagtaagagattttttaccaaggttaggcgttttaaggagctcaacctcggtacgctgtaccagatcaccgatatagtggatagcttctgctttaaggcagttagcagagcggacagtcaattccagatcgtcaacagggcgcagcaggatcggatcgaactctggtttctcttctttcacttcaggctgacgtacatcacgtaagtcaacgaaagcttccagttgttcagccagaatggttgccgcacgacgaatcgcctcttcaggatcgattgtgccgttggtttccatttcgatgaccagcttgtccaggtcggtacgctgttctacacgcgctgcttcaacattgtaggcaatacgctccacagggctgtagcatgcgtcgaccagcagacggccgattgggcgctcatcttcttccgaatgaattcgggtagaagccggcacataaccacgaccgcgctgaactttgatacgcatgctaatagacgcgttctcatcggtcaggtggcagatcacgtgctgcggcttgacgatttcgacatcaccgtcgtgggtgatatcggctgcagtcacagggccaatgccagatttattcaaggtaagaataacttcatctttgccctgaactctcaccgccagccctttcaggttgagcaggatttccaggatatcttcctgaacgccttctttggtgctgtactcatgtagtacaccatcaatctcaacctcggtcaccgcgcaacccggcatcgatgagagcagaatacggcgcagtgcgttacccagagtatggccaaagccacgctctaaaggctcaagggtcaccttggcgtgcgtcgaactcacttgctcgatatcaaccaggcgcggttttagaaactctgtcacagaaccctgcattgtgtcctctctttggtactaagctttacttggagtaaagctcgacgatcaggtgttcgttaatgtccgcagacagatcagaacgctccggcttacgcttaaacgtaccttccatcttgccagcatcaacttccagccaggttggcttttcacgctgctcagccagctccagagcggctttcacgcgagactgcttcttcgctttctcacgaatgcttacaacgtcattcggactaacctgataagaagcgatgttaacaacacgaccgtttaccataattgctttatggctaaccagctgacgtgcttctgcacgagtggcaccgaagcccatacggtatacaacgttgtccagacgaccttccagcagagccaacaggttttcaccggtgttgcctttcagacgtgctgcttctttgtagtagttacggaactgacgctccagcacaccatagatacggcgaactttttgcttttcacgcaactgcacaccatagtcagacagacgcggtttacgcgcaccgtgctggccaggagcttgttcaattttacacttggtatcgatcgcgcgaacgccagacttaaggaataagtcggtgccctcacgacggctcagcttgagcttaggacccaaatatcttgccattttctttctccaacaaacctggaaaacgaggcgttatacgcggcgttttttcggcggacgacaaccgttatgagggatcggagtcacatcagtaatgttagtgatgcggaaacctgcggcgttcagagcacgaatagtagattcgcggcctggacccggacctttaaccataacttccagattcttgatgccgtattctttcacggcgtcagcgcaacgctctgctgcaacctgagctgcaaacggagtggatttgcgagaaccacggaaaccggaaccaccggctgttgcccaacccaacgcgttaccctgacgatcagtgatagtcacgatggtgttgttgaaagaagcatggatatgagccacgccgtcagagacttgttttcttacacgtttacgtgcacgaattggtgcctttgccattattcaatcaccccgattatttcttgatcggtttgcgcggacccttacgggtacgtgcgttggtcttggtacgctgaccgcgaaccgggagaccacgacgatgacgcaaaccgcgatagcaaccaagatccatcaggcgcttgatgctcatgctgatttcacggcgcagatcaccttcaacgacaaatttggcaacttcgtcacgcagcgtgtcgatttgtccttcagacagctcactgatcttaacatcttcagcgatacccgctgcagccaggatggctttagaacgggtcttgccgacgccataaatcgaagttaatgcgattacggcatgcttatgatcaggaatgttaatgcctgctatacgggccactatgcactcctactatttaatatgtacgttccatgctgaaaagcccgttttcaggatactcaaatggaaacgcacagacatacaaaagattggctggctaatctagccagctcaacccaactttgcaagaaaaatatgcgaaaaaatcagccttggcgctgtttatgcttcggctcggcactgcaaatcacacggatgacaccatcacgcttaacgattttgcagttacggcataatttcttgacggaagcacgaactttcatttttactctccgtaacttctcgggcgaccaattatcggccgtagcctttcaggttcgccttcttcaatgcagactcatactgactggacatcatcagagtttgcacttgagccataaagtccataatcacgacaacaacgataagcagtgaggtcccaccgaagtagaacggtactttcattgcatcacgcatgaactccgggatcaggcagataaaggtaatatacagcgcaccaaccagggtcaggcgggtcattactttatcgatatacttcgccgtttgctctcccggacgaattcctggtacaaatgcaccggacttcttcaggttatctgctgtttcacgcgggttgaaaaccaacgccgtgtagaagaaacagaagaagatgattgcagacgcatagagtaacacataaagcggttgcccaggctgcaaatacagcgaaattgttgtcagccagttccaaccagtaccgcccccgaaccatgacgcgatggtcgccgggaacagaataatactggaagcgaagattgccgggattacccccgccatattcactttcagcggtaaatgtgtgctctgtgcagcatagacacgacgaccttgctgacgtttcgcgtagtttaccacaatgcggcgttgaccacgctcaacaaatacaacaaagaacgtcactgcaaatactaatactgcaaccaacagcaacacgaggaagtgcaggtcgccttgacgcgcttgctcgatagtatgggcaatggctggcgggagtcccgcgacaataccggcgaagataatgattgaaataccgttgccgatacctcgttcagtgatctgttcgcccaaccacatcaggaacatcgttcctgtgaccagacttacaacagcggtgaagtagaatgcaaagcccgggttaatcaccaggccttgcataccaggcatattcggcagaccggtagcaataccgatcgactggaatattgccagcaccagagtaccgtaacgggtgtactggctgatcttacgacgaccagactccccttctttcttaatttctgccaacgttgggtgaaccaccgtcagcagctggataatgatcgacgccgaaatatacggcatgatccccagagcaaagatagaagcacggctgagagcaccaccagagaacatgttaaacatctcaatgatggtgcctcgctgttgctcaagcagtttggcaagtacagcggcatcaataccagggatcggaataaaagagccaatacggaacacaatcagcgcaccgataacaaacagcagtctgcgtttcagctcgcctaagccacctttggcactttgaaaatctaatcccggttgtttagccatctgctacttattcctcgattttaccgccagcagcttcgatagcagcacgagcgcctttagtaacacgcaggccacgaacagttaccggagtcgttacttcgccagccaggatcactttcgcgaactcgatctggataccgataatgttagccgctttcagcgtgttcaggtctactacaccgccttctactttagccaggtcagacagacgaacttcggctgtaatcgctgctttacgagaagtgaagccgaatttcggcagacgacggtacagaggcatctgaccaccctcgaaaccgcgacgtacgccaccgccagaacgagacttctgacctttgtgaccacgaccaccggttttaccgaggccagaaccgataccacgacccaggcgtttacccgcctttttggagccttcggccggagacagagtatttaaacgcatctcttactcctcaactttaaccatgaaggaaaccgcgttgatcataccgcgaatagcaggagtatcctcgcgctctacggtgtgaccaatacgacgcagacccaggccaagcagcgttgccttgtgtttcggcagacgaccgattgcactgcgggtttgagtaattttaatagtctttgccatggtttatttccccagaatttcttcaacggatttaccacgcttggcagcgaccatttctggagaattcatattttccaggccatcaatagttgcacgaaccacgttgatcgggttggtggaaccatatgctttagccagaacgttatgaaccccagcgacttccagaacggcgcgcattgcaccaccggcgatgataccggtaccttcggaagccggctgcatgaatacgcgagaacccgtgtgaacacctttaacagggtgttgcagagtgccgttattcagcgcgacgttaatcatattgcgacgggctttttccatcgctttctggatcgctgctggaacttcacgcgctttaccgtaaccaaaaccaacgcgaccgttaccatcgccaactacagtcagagctgtgaaggagaaaatacgaccacctttaacggttttagatacgcggtttaccgcgatcagcttttcctgcagttcgccagcttgtttttcgatgtgagccatcttacacctctaccttagaactgaaggccagcttcacgggcagcatctgccagtgcctggacacgaccatgatattggaacccggaacggtcaaaggatacatctttgatgcctttttccagagcgcgttcagcgacagctttacccacagctgcagccgcgtctttgttaccggtgtacttcagttgttcagcgatagctttttctacagtagaagcagctaccagaacttcagaaccgttcggtgcaattacctgtgcgtaaatgtgacgcggggtacgatgtaccaccaggcgagttgcgcccagctcctggagcttgcggcgtgcgcgggtcgcacgacggatacgagcagatttcttatccatagtgttaccttacttcttcttagcctctttggtacgcacgacttcgtcggcgtaacgaacacccttgcctttataaggctcaggacgacggtaggcgcgcagatccgctgcaacctggccgatcacctgcttatcagcgcctttcagcacgatttcagtctgagtcggacattcagcagtgatacccgcaggcagctgatggtcaacaggatgagagaaacccagagacaggttaatcacattgcctttaaccgctgcacggtaacctacaccaaccagctgcagcttcttagtgaagccttcggtaacaccgataaccattgagttcagcagggcacgcgcggtaccagcctgtgcccaaccgtctgcgtaaccatcacgcggaccgaaggtcagggtattatctgcatgtttaacttcaacagcatcgttgagagtacgagtcagctcgccgtttttacctttgatcgtaataacctgaccgttgatttttacgtcaacgccggcaggaacaacgaccggtgctttagcaacacgagacattttttcctccgattaggctacgtagcagataatttcgccaccaagaccagcctggcgcgctgcacgatcagtcataacacctttagaggtagaaacaactgcgatacccagacccgccataactttcggcagctcatctttacgtttatagatgcgcagacctgggcggctgacacgctgaatgctttctacaacagctttgccctggaaatacttcagagtaagttccagttcaggcttggtgtcgccttcaactttaaaatcttcaataaaaccttcttccttcagcacgttggcgattgccactttcagcttggaggaaggcatggtgaccgcagctttgttcgcggcctgaccgttacggatacgggtcagcatatccgcgatcggatcttgcatgctcatctgtctttactcccgtgattcaattggtgacaattaccagctagcctttttcagacccgggatttcaccgcgcatagcggcttcacggaccttaatacggctcaacccgaacttccgcaggaaaccatgcggacgacctgtttgacggcagcggttacgctgacgagacgggctggaatcacgcggcagagtctgcagcttgagaacagcgttccaacgatcttcgtcggaagcgttcacatcagagatgatcgctttcagttcagcgcgtttcgcgaagtatttatcagctaaagctacgcgttttacttcgcgtgctttcattgattgcttagccatttagtaaccctaccttacttgcggaacgggaagtcaaaggcagccagcagagcgcggccttcttcgtcagatttcgcagtagtggtaatggtaatatccaaaccacgaacgcggtcgactttatcgtagtcgatttctgggaagatgatctgctcacggacacccatgctgtagttaccacgaccgtcgaaagacttagcggacaggccacggaagtcacggatacgaggtacagcaatagtgatcaggcgctcaaagaactcccacatgcgttcgccacgcagagttactttacagccgatcggatagccctgacggattttgaagcctgcaacagatttgcgtgctttggtgatcagcggtttttgaccggagattgctgccaggtctgctgctgcgttatccagcagttttttgtcagcgatcgcttcaccaacacccatgttcagggtgatcttctcgacccgagggacttgcatgacagaattgtagttaaactcagtcatgagttttttaactacttcgtctttgtagtaatcatgcagtttcgccatcgtactactccaaattacttgatagtttcgctgttagacttgaagaaacggacttttttgccgtcttcgaatctaaagcctacacggtcagccttgccggttgccgcattgaagattgctacgttggaaacctgaatagcggcttctttttcaacgatgccacccggttggttcagggccggaaccggcttctgatgtttcttaaccaggttgataccttcaacaatgaccttgccggaagacaggacattcttaactttaccgcgtttacctttatctttaccggttaacacgataacttcgtcatcacgacggattttcgctgccatgattcgctccttagagtacttctggtgccagagagataattttcatgaacttctcactacgaagctcacgagttaccggcccaaaaatacgcgtaccgataggctgctcgctgttgttgttcagaagaacacaagcattaccatcgaagcgaatgacagaaccgtccgggcgacgaacacccttcttggtgcgcaccactaccgccttcagcacatcaccttttttgaccttaccacgcggaattgcttctttgatggtgatcttgatgatgtcgcctacgcctgcgtagcgacggtgcgagccacccagaaccttgatacacattacgcgacgtgcaccggagttgtcggcgacgttcagcatagtctgttcttggatcattttagtgctccgctaatgtcaactactactgagacccgaaaatcaggtcgttaaaaatccccatatcgagggcgcggcattataacaccgcttcaaggatatgggtagaaaaaataaacggctcatttctgagccgtttattcgtatcgagagagtgtactgtattacagaaccgctttctctacaacgcgaaccagcgtccaggatttagtcttggacagcggacggcattcgcggatttcaaccacgtcaccgataccgcattcgttgttctcgtcatgtacgtgcagtttggtcgtacgcttgatgaatttaccgtagatcgggtgtttcacaaaacgttcgatagcaacaacaatggatttctccattttgtcgctaacaacgcgaccttgcagagtacggattttatcggtcattacgcacccgccttctcgttcagtaaagtcttaacgcgtgcgacatcgcgacgcacttgcttcaacaggtgagactgttgcagctggccacttgcagcctgcatacgcaggttgaactgctcacgcagcaggttcagcagctcggtgttcagctcttcaacgctcttctcacgcagctcttttgctttcattacatcaccgtcttagttacaaaggtggttttaatcggcagtttcgctgctgccagcttgaatgcttcacgggccagctcttccggaacaccgtccatttcatacaggactttacccggctgaatcaaggcaacccaatactccacgttacctttacctttacccatacgcactgccagcggcttttcagtgatcggtttgtccgggaacacacggatccagatcttaccttgacgcttaactgcacgggtcatagcacgacgtgctgcttcgatctgacgggcagtcagacgaccacggccaacagctttcagaccgaagctgccgaagctaacatccgtaccctgcgccagaccgcggttacggcctttatgcattttacggaattttgtacgctttggttgtaacatcagcgacgctccttatttacggcctttacgctgctgctttttaggctgagcagccggtttttccggttgttcaacagcagccataccacccaggatctcgcctttgaagatccacactttaacgccgattacaccgtaagtggtgtgcgcttcagaggtgttgtagtcgatgtcagcacgcagagtgtgcagcggtacgcgacnttcgcggtaccattcggtacgtgcgatttccgcgccgcccagacggccgctaacttcaactttaatacctttagcgcccagacgcattgcgttctgtacagcacgcttcatagcacgacggaacataacgcgacgttccagctgagaagtgatgctgtcagcaaccagttttgcgtccagttcaggcttacgaacttcggcgatgttgatctgtgcaggaacgccagcgatgtccgctacgaccttacgcagtttttctacgtcttcaccttttttaccgataacgatacccgggcgagcagtgtgaatggttacacggatgctcttagccggacgctcgataacgatacgagatacggacgctttagccagttccttagtcaggtactgacgtactttaaaatcgctgtccaggttgtcagcgaattctttggtgttcgcaaaccaggtagagttccatggttttacaatacccaggcgaataccattaggatgtactttctgacccattgctagtctccagagtctcagcgatcggacacaaccacagtgatgtggctggtgcgcttcaggatgcgatctgcacgaccttttgcacgcggcataatgcgcttcatgctcgggccttcgtctacgaaaattttcgtaactttcagatcgtcaatgtcagcgccatcgttgtgttcagcgttagcaatggcagattccagaactttcttgaccagtacagccgctttcttgttggtgtaggtcaaaatatccagagcctgcgacactttcttaccgcgaatcaggtcagcaacaaggcgaaccttctgagcagaagaacgagcatggcgatgtttagcgatagtttccatctcttcctcctaccttatttcttcttcgcttttttatcagcagcgtggccgcgataagtacgagtcggtgcgaattcacccagtttgtgaccgaccatttcgtcggttacaaataccggaacgtgctgacgaccattatggacagcgatggtcaaaccgatcatgttaggaaagatcgttgaacgacgggaccaagtgcgcaggggcttcttgtctccgctttccaccgctttctctaccttcttcagcaagtgcaggtcaataanaggacctttcttgagagaacgtggcatggcttatcctctaaaattatttgctacggcgacgtacgatgaatttatcagtacgcttgttgctgcgggtcttcttacctttggtctgaacgccccacggagttaccgggtgcttaccaaagttacgaccttcaccaccaccatgtgggtggtctaccgggttcatcgcggtaccgcgaacggtcggacgaacaccacgccagcgtgcagcacctgctttacccagaacgcgcagcatatgctcagcattgccaacttcgcccagagttgcacggcagtctgcttcgactttacgcatttcaccagaacgcagacgcagggtgacataagcaccgtcgcgagcaacgatctgaacgtaagtaccagcggaacgtgccagctgaccgcctttacctggtttcatttctacgttatgaacagtagaaccaaccgggatgttgcgcatcggcagggtgttgcctggtttgattgcagcatcaacgccagactgaatctggtcgccagctttcaggcctttaggggccaggatgtaacggcgttcaccgtctttgtacagaaccagcgcgatgttcgcggaacggttcggatcgtactcaagacgttcaacaactgccgggataccgtctttgttgcgtttgaagtcaacaatacggtaagcctgcttgtggccaccaccgatatgacgagtggtgatacggccattgttgttacgaccaccggatttgctgtttttttccagcaacggagcaaaaggtttgcccttgtgcagctcagggttaaccactttaactacgtggcgacgacccggagatgtcggtttacatttaacaactgccattgtattactcctccgacttactcagcgccgccaacgaagtccagattctggccttctttcagggtgacgtaagcttttttccagtcgctacgacgaccgatacgctgtccgtgacgtttaactttccctttaactaccagagtgttaacgacttcgacttcgacttcaaacagtttctgcacagcagctttgatttctgctttggtcgcgtctttagcaactttgagtacgatggtgttggatttttccatcgcagtagacgctttttcagaaacgtgcggtgcacgcagcaccttcagcagacgttcttcacgaatcatgccagcatctcctcaacttgcttaacagcatcagcagtcattacgactttgtcgaaggcgatcaggctaaccgggtcgataccagttgcatcgcgtacgtcaaccttgtgcaggttgcgcgcagccaggaacaggttttcgtccagctcaccggtgatgatcagcacatcttccagagccatgtctttcagtttctgtgccagcagcttagttttcggcgcttctacagagaacttctcgacaacgatcagacgatcctgacgtaccagttcggacaggatgcttttcagcgcgccgcggtacatcttcttgttaactttttgactgtggtcctgcggacgagcagcaaaggtcacgccaccagaacgccagatcgggctcttgatagaaccagaacgcgcacggccggtgcctttctggcgccacggttttttaccggaaccagttacttcagcacgagtcttctgagcacgagtaccctgacgagcaccagctgcataagcaacaacaacctggtgaaccagcgcttcgttgaaatcacgaccgaaggtagtttcggaaacagtcagcgcgctctgcgcgtctttcaatactaattccattgctatctccttacgccttcacagctggtttaacgatcaggtcgctaccggttgcacccgggacagcacctttaaccagcagcaggttgcgctcagcgtcaacgcgtactacgtcaaggctctgaacggttacacgttcgttacccatctgacctgccattttcttgcctttgaacactttgcccggagtctggttctgaccgatagaacccggaacgcggtgagacaaggagttaccgtgagtagcgtcctgggtacggaagttccagcgcttaacggtacctgcgaaacctttacctttagaggtgccagttacgtcaacttttttaacgtcagcaaacagttcaacgctaatgctctgacctacagtgaactcttcgccttcagccaggcggaattcccacagaccacggccagcttctacgccagctttagcgaagtggccagcttcaggcttggtcacacggttagcttttttagcaccggtggtcacctgaatagcacggtagccatcgttagccaggtctttaacctgagtaacgcggtttgcttcaacttcgattacggttactgggatagaaacgccgtcttctgtgaagatacgggtcatacccacttttttaccgactaaaccaatcattgtttcaacctctcaatcgctcaatgacctgattaacccaggctgatctgcacgtctacaccggcagccagatccagacgcatcagagcatcaacggttttctcggttggctcaacgatgtcaaccagacgcaagtgagtacggatttcgtactgatcgcgcgcgtctttgttgacgtgcggggagatcagaacagtgaagcgctctttgcgtgtcggcagcgggatcggaccacggacctgcgcaccagtgcgcttggcagtctcgacgatttccgcggttgcttgatcgatcagacgatgatcaaacgctttcaggcggatacggattctttggttctgcatgagaccagagctccaattattttataaacgaaaatgattactcctcagacccattacgattgatgggagagtgtaaccgttcttacgtagctccccgattgggagcattgttaggtagccaaattcggctaactgaggttcagattgaacctgctgtcaactacgacaagcccgcgcattatacgcaaatctgagcctgacgcaagcatcgggcagaaattaatcgcaacgcgcagattgcgagctgcattccacgaaatttgtaaggttgtgaagatagcgtttttcaccggaatcaggttaacaaatcagcgctctctctgttgctgagcatccggagttattcgatggtgatactccaattacagaggatgttttatggacactacccttccctttctaattttgtacgcttgtttatcagccctactttttttctgggatgcaaagcatggcttgttacctgacagatttacgtgcccgttactctggtcaggtcttttgttctatcaagtttgtcatcctgatggtttagccgatgcgttatggggggcaattattggttacggcacattcgctgtcatttactgggggtatcgcatactgcgccataaagaaggattaggctatggtgatgtgaagtttctcgccgcccttggcgcctggcattcatgggccttcttaccacgactggttttccttgctgcctcattcgcttgcggagccgtagttattggtctgctcatgagnggaaaagaatcattaaaaaacccgctgccttttgggccatttctggcggctgcgggtttcgttataggctgggatagtttgctgataggccgttaatcattaactttaatttgtgattgcaggtaattttgtaggccgattttaccgatgagatccagttcagtttcgagccagtcgatatgaccttcttcatcggcaaggatctcgatcatcatatcgcggctaacatagtcatgaacgctgtcggcatacgcgatagcctcacgcagatccttcgcaccttccagctctaatcgcaggtcggattgcagcatctcttcgacatcttcaccgatccctagcttacctaaatcctgtaagttggggattccttctaaaaacaaaatacgctcgatatatttatcagcgtgtttcatctcatcgatggattcatggtattcgacgtcattaagacgcatcagtccccagtttttaaacatccgggcatggagaaaatactgattgattgcgacaagctcatttcccaatagtttattgagataatttatgattttaacatcacctttcattttatagtccctccgcttccactattagagcgtagatggggctagcgggatgtcaaaaaataagcgtgggcttcaggcaatctctttaaattctggcatctgcatcaactcgtcctgcatcacttcgcnnnnggcgcgaatgcacttaccacattgatttcccacaggaataaacttacgcaattgttggaaagattgcggatgaaactgacggactgcctggcgaatttttttgtcacttacaccattacacaaacaaacgtacatgattgctcccgttcaaattctgcgcaaagtgtaaatgagaatagttatgattacaatagcacagttttatttgcgccatagttcagcgagcaaaattacgactaaatatttcgagctcaaattacgggcagcaaaaa

SEQ ID NO: 1525 - DNA, 7760 bp, Escherichia coli
  Strain O55:H7
  modified_base (2595)..(2595): a, c, g or t
  modified_base (4515)..(4515): a, c, g or t
  modified_base (5200)..(5200): a, c, g or t
  modified_base (6013)..(6013): a, c, g or t
  modified_base (6460)..(6460): a, c, g or t
  modified_base (6598)..(6598): a, c, g or t
aagcgcccttttcaattcaaaactaattaacgtgtaattagcccagaactttagctacaacgcccgcgccaacggtacggccgccttcacggattgcgaaacgcagaccgtcgtccatcgcgatcgggtggatcagggtaacaaccattttgatgttgtcgcccggcattaccatctctacgccttccggcagttcgatggtaccagtcacgtcagtagtacggaagtagaactgcggacggtagcctttgaagaacggagtatgacggccgccttcatctttggacagaatgtacacttcagattcgaacttggtgtgcggcttgatggtgcccggcttagccagtacctgaccacgttcgatttcttcacgtttgataccacgcagcagaacacctacgttctcaccagcacggccttcgtccagcagtttgcggaacatttcaacgccagtacaggtagacttctgagtctctttgataccaacgatttcaacttcttcaccaactttgatgataccgcgttctacacgaccggtaacaacggtaccacgaccggagatggagaatacgtcttcgatcggcagcaggaacggcttgtcaattgcacgctctggttccggaatgtaggaatccaggaagccagccagttccaggattttcgcttcccactctgcgtcgccttccagcgctttcagagcagaaccacgaacgatcggagtgtcgtcgcccgggaagtcgtactgagacagaagttcacgaacttccatttcaaccagttccagcagctcttcgtcatcaaccatgtcgcatttgttcaggaacacgatgatgtacggaacgcctacctgacgacccagcaggatgtgctcacgagtctgcggcatcgggccgtcagtcgcagcaactaccaggatcgcgccgtccatctgagcagcaccggtgatcatgtttttaacatagtcggcgtgccccgggcagtctacgtgtgcgtagtgacgggtcggggtgtcatattcaacgtgagaagtgttgatggtgataccacgagctttttcttccggcgcgttatcgatctggtcgaatgcacgagcagcaccgccgtaggttttagccagtacggtggtgattgcagcggtcagagtagttttaccgtggtcaacgtggccgatagtaccaacgttaacgtgcggttttgtacgttcaaatttttctttagacacggctatattccttactatagtgctctccccttcaggagagagcacgggactttggtattaacccttaggcttatttaccacgggcttcaattacggcctgagcaacgttactcggcgcttcatcatacttcaggaattccatagtgtatgatgcacgacctttggtcagagaacgcagctgagttgcgtatccgaacatttcagacagcggtacttcagcgtggatcttaacgccagtaacttcagattcctgacctttgagcataccacgacgacggctcaagtcaccgataacgtcaccggtgttctcttccggagtttctacttcaaccttcatgatcggctcaagcagaactggtttcgctttcttaaagccttctttaaaggcgatagaagcagccagtttaaacgccagttcagaggagtcaacgtcatggtaagaaccgaagtgcagacgaatacccatgtctactaccgggtagcctgccagcggacctgctttcagctgttcctggatacctttatcaacggccgggatgtattcgccagggattacaccacctttaatgtcgttgatgaactcgtagcctttcgggtttgaacccggctccagcgggtacatgtcgataacaacatgaccatactgaccacgaccaccagactgtttcgcgtgtttaccttcaacatcggtaactttctggcggatagtttcacggtaagcaacctgcggtttacctacgttcgcttcaacgttgaattcacgcttcatacggtcaacgatgatgtcgaggtgcagttcgcccatacccgcaatgatggtctggttagattcttcgtcagtccatacacggaaagacgggtcttctttagccagacggcccagagccagacccattttttcctggtcagctttggttttcggttcaactgcgatggagattaccggctcagggaattccatacgttccagaatgatcggcgcatccgggtcacacagggtgtcaccagtggttacgtctttcagaccgatagcagcagcgatgtcgcccgcgcgaacttctttgatctcttcacgtttgttagcgtgcatctgaacgatacgaccgaaacgctcacgtgcagctttcacggagttcagtacggtatcaccagagttaaccacaccggagtaaacacggaagaaggtcaggttaccaacaaacgggtcggtagcgattttgaacgccagtgcagagaacggctcgtcatcacttgcgtgacgttcagccggagtgtctttaccgtcgtccaggataccgttgatcgcaggtacgtcaaccggggatggcaggtaatcaattaccgcatccagcatcgcctgaacacctttgttnttgaacgcagaaccacaggttaccaggatgatttcgttgttcagaacgcgctgacgcagagcacctttgatttctgcttcagtcagttcttcaccacccaggtatttttccatcagctcttcagaagcttcagctgcggattcgatcaggttctggtgccattcgttagccagttcaaccatgtctgccgggatatcttcgtattcgaaggttacgccctggtcagcgtcgttccagttgatagctttcattttcaccaggtcaacaacaccggtgaaatgttcttcagcaccaatcgccagctgcagcggaaccgggttcgcgcccagacgggttttgatctggttaacaactttcaggaagttcgcacccatacggtccattttgttaacgaacgcaatgcgcggaactttatatttgtttgcctgacgccatacggtttcagactgcggctgaacaccaccaactgcgcagtaaaccattaccgcaccatcgagcacacgcatggaacgttctacttcgattgtgaagtcaacgtgccccggggtgtcgatgatgttgatgcgatgcggctcatactgcttagccataccagaccagaatgcagtagtcgcagcggaagtgatggtaataccacgttcctgctcctgctccatccagtccatggttgcagcgccgtcatgaacttcaccgattttatggtttacaccggtgtagaacagaatacgttcggtagtagtggttttaccggcgtcgatgtgcgcactgataccgatgttacggtagcgtgcgatgggtgttgtacgagccatttgtttcctcgtttatcttttaggcgttcaatttaagtagcccaaagcgggctgcttactggaagcgcccgcctggtgactaaaactccgaagggattaccaacggtagtgtgcgaacgccttgttggcttcggccatacggtgaacgtcttcacgtttcttaactgcagtacctttgttttctgcagcatcagaaagttcgttcgccaggcgcagagccatggatttatcaccgcgtttacgagcagcttcaacgatccaacgcattgccagagcattacgacgaaccggacggacttcaactggtacctgataagtagaaccaccaacgcggcgagacttaacttctacagtcgggcgcacgttttcgagagctacttcgaatgcttccagttcagatttaccagagcgctgagccagggtctccagcgcgctgtatacgatagattcagcagtagattttttaccatctaccatcaggatatttacaaatttagccagcagttctgatccgaacttcggatccggcagaattttacgctgaccaatgacgcgacgacgtggcatggaaatactccgttgttaattcaggattgtccaaaactctacgagtttagtttgacatttaagttaaaacgtttggccttacttaacggagaaccattaagccttaggacgcttcacgccatacttggaacgagcctgcttacggtctttaacgccggagcagtcaagcgcaccacgtacggtgtggtaacgaacacccgggaggtctttaacacgaccgccacggatcaggatcacggagtgctcctgcaggttgtgaccttcaccaccgatgtaggaagtcacttcgaaaccgttagtcagacgaacacggcatactttacgcagcgcggagttcggttttttaggagtggtagtatatacacgagtacatacgccacgtttttgcgggcatgcttccagcgcaggcacgttgcttttcgcaactttgcgagcacgtggtttgcgtaccagctggttaactgttgccattaaatagctcctggttttagcttttgcttcgtaaacacgtaataaaacgtcctcacacaatatgaggacnccgaattttagggcgatgccgaaaaggtgtcaagaaatatacaacgatcccgccatcaccaggccatctggctggagtgcttaaccgtaagtctgacgaaatcagtatagtcaatgggaatgatgtcgttcgaaatttgaccagtcaaaccgcgggcaataaggtcttcgttcagggcatagaccttaatgggggcattacgcagactttcaaggtagcggttaccgtcaactgcggcagttacgccatcttgcaataatagcagttcgtcgccttcactgagcagacgcagcagcgcagcaaaatccgtcagccagggtgaacgatgtaacgtgtgcagcataaacgcctcaaaacctcaaaataacatcgtagttggcgagttcgcggcgtaaggcatctgcttcgagcggcgtggcttcgacaacaaagggggtctgcggatctaacccgcgttcgcgcagtgaagccgcacaaacccagcactgttcaatgtcgtacagacccaacaatttaaaagtggcaatgtaatcacgcgccagcactgcatcgggcttttgtcctggcagtagctgaaaaacgccatcagcaataaagaagacggccagctcgtcagttaacgcggaagttgccagtaaagcatctaaaccttcccgcccggcagcggtaccatgaggcacagtanaaaaaacaaacgcaattcgtttcatcagaactgtaccaccctgtcacaggtcagcgaggcttccgccagcgcgccaagtccgcttaaggtaaatccctgctgaaggtttgacgaagccagccccagtcttccggcctccgtttcatcaacaacgccacggcgtaatgctgccgctacgcagatattcagcgccacaccatgttgcgcattcaactgttgccagccgcgcacaaggtcaaattcgtcgcttgccggtgaggtcaagtggttagcgttatagaccccttcccgatagaaaaagacgctgcttaacttatggccttctgctatcagcgcctgcgcaaactgaaaagcactactcgcctgttgcgtaccgtatgctggcccggtcaccacgatggcaaaacgcattacttatcttgcccctggaaatcaccgctcttgaactggcggatgtagagatagacagtgtgtttggagatgttcaggcggtcagcaacctggttgatcgcatctttaatatcgaagatccctttctcgtagagattcagcacgatctgacgatttttggcgttattagaaacattgcgatcggcattcacttcttcgatggtgaactccagcgtttgggtaaccagatcttcaacagaagaggcaaagttgacgcttgaaccgacatccggggtttctggcggcacaaaggtgctcataatctgcgagaagggaacatcaagattcatattgatgcacagcagaccaattacacgctgttcgcggttacgaatcgcgatagtcagggacttcattaatacnccgcttttggcgcgagtaaagtagcatttagaaacgctgctatccgctcccgtcatatcgtgcagcatacgtagcgccaggtcagtaattggcgaaccaatcttccggcctgtatgttcaccgttagcaatgcgaatggctgaacattttagatcctgcaaagagtgcaaaacgatttcacagtgggagccaataagcatcgctaacccgtccaccaccgcttcgtaggatttcagaatatcaaaatcggtctgctcgaaaggacgttgatccagtaaatccaactcactggtttcgttggttaaaagcgacctggacatgaaaaaaaacactccttttcaggagcctgtcgttaacttttcagggcaggctcattaatgatgcgggtaactaaattaatacagcggaggttccgctttccagcactaattatatccggcctgtaanaaaaaaaccgccgcctggtcaggcggcggttcttaatgcttattttttagcagaatctgcggctttcgcatcagcttccggctttgcatcagccttcggcgctggtttcacatccagcagctctacgtcaaacaccanggtagaattcggtgggatccccggaacacccgctttgccgtaagccagttctggtggaataaccagtttgatcttaccgcctttcttgatgttcttcagaccttctgtccaacccgggataacaccgtccagacggaaagagagcggttcaccacgggtgtaagagttgtcgaactctttaccgtcgatcagcgtacctttgtagttcacgacaacagtatcgctgtctttcggtgcttcgcctttaccggcttctactacctgataaaccaaaccagtggaagaggttttcacacctttctctttggcaaatttctcgcggtactctttaccttttgcttcgttatcagccgcgtctttttccatcttcgcctgagcagaagacttcacgcgagcttcgaatgcttgcagagtctgttcgatctcttggtcggagagtttgctcttatcagcaaatgcatcctgaacaccagcgatcagctgatctttatccagtttgatgcccagtttttcttgttcttttagagagttttccatgtaacgacccagcgaggcacccagtgcataagctgatttctgatcgtcatttttgaacgctgctttgctgtcagcagttgtagcaggttttgcagcttcagcagcaaaagtgattggtgcatgcaaggcaacggccattgtggtcgccagcagcgttactttaaacagtgatttcatccatatctccaggatcggggcatctcaccccagggttaactattatcagaagggtactataaagcgttgtcgaacaaatctacatacagacacgccctattatcatctattttcagactctttttgtttaaattagtttcgatgaccgcgaaatgagtgctgtctcgggcagcaaagttaagtagaatccgcggcgaccattcgacaaaagaggtgaatcatgcaggatttatcattggaagcacgcctggcagagctggagagccgactggcttttcaggaaatcaccattgaagaactgaacgtcacggtgaccgctcatgaaatggagatggcgaaactgcgcgatcatctgcgtctgctgaccgagaagttaaaagccagccagccgtcgaacatcgcgtcgcaggctgaagaaacgccaccgccacattattgaggcgtaaaa

SEQ ID NO: 1526 - DNA, 24556 bp, Escherichia coli
  Strain O55:H7
  modified_base (2769)..(2769): a, c, g or t
  modified_base (5150)..(5150): a, c, g or t
  modified_base (5152)..(5152): a, c, g or t
  modified_base (5604)..(5605): a, c, g or t
  modified_base (6671)..(6671): a, c, g or t
  modified_base (9512)..(9512): a, c, g or t
  modified_base (11002)..(11002): a, c, g or t
  modified_base (13823)..(13826): a, c, g or t
  modified_base (13830)..(13830): a, c, g or t
  modified_base (17321)..(17321): a, c, g or t
  modified_base (18286)..(18286): a, c, g or t
  modified_base (18309)..(18309): a, c, g or t
  modified_base (18312)..(18312): a, c, g or t
  modified_base (18342)..(18342): a, c, g or t
ttttttgtcaccttttcggtattagtggcaaccgcaaccgccgttgcctttaccgccacagcagccttcgccaccgtgttcatgaccgtgatcgtggccatgaccgccgcagcaaccgtcgtggtcgtgatcgtggtgatgatcgtgcacgccgtgaacgtggccatgagccagttcttcttcggtcgcttcgcgaatcgccacaacttcaacgttgaatttcaggttctgaccggccagcatgtggttaccatcaaccacgacgtgatcgtcttcaaccgcagtgatttcaaccggtaccggaccctggtcggtttcagccaggaaacgcatacctacctgcagttcatcaacgcccataaatacgtctttaggaacacgttgcaccagcttttcgtcgtactgaccgtaagcgtcgttcgcgccaacagcgacatcaaatttgtcgccaacttcatgaccttccagcgccgtttccaggccagagatcagggaaccgtgaccatgcaggtagtccagcggcgcactcaccggagactcatcaaccaacacaccgtcttctgtacgtacctgataggccaggctgaccaccaggtcttttgctactttcatgatatctcctgagcatgggaagaatagtggcgcagattgtagcggaattctgcagccgtgtactcactagcttaaaaaaactcggcgcatatcgctagtccggatgaaaaatcccgatcacttgctcatctttgcgaacgtgatcgcgggcttctttgtctgcttctcgcatctggtgtccgcacttaacgcattcaacaatatcaatattattttcgcgccacatcgccattgaatcctgcgcctgacaggccgggcattttgcgcccgcaataaaacgttttcggattgccatctttaccctctactcaaattcatcccagccgtccagctggcgtcgttcttgttgcatttcacgctggaaaatctcttccagttcgcgtcgggcttccctggcgcgagaaatttgtacggtatcggcatgcattgggatgagctctcgcagcatccgcatatccaggcggcgaaaatgcagttgcgcccgctgtgcctgatgcggatgcataccaagcgtgaccagcgtcttgcgccccagctctaacgcactggagaatgtttcacgggaaaactgcgtcacccctgcctgtaataactcatgcgcttccacacgtccgcgcgctcgcgcaagaatatgcaaatgcggaaagtgctgctggcatatttccaccagcttcatggtgtcttccggctcgttacaggtaatgacgatagactcagcggcctctgcacccgcagaacgtaaaagatctacctgcgtggcatcaccgtaataaactttgtagccatatttgcgcatcaggttaacggcgctgatatcccgctccagcacagtaatgcgcattttatttgccatcaacaaacgaccaatcacctgcccaaaacgtccaaagcccacgacaatgacctggggtttatcatcgttgacccacggtttttcgtcttcttcttccggtccgttaaactggcgggatagccatttatccaccagcttcatcagcagcggcgtggtcatcatggaaagcgtcaccgtcaccagcaacagcgccatctggtcgccctggaataagcgttgtgaagaagcggtagaaaagaggacaaaggcaaactcaccgccctgactcaacacgccagcaaactgcatccgctctgagctacgcacgccatacaatcgcgccagcagatacagcacgagaattttcaccgccaccagcacaaccacgcttatcactacccacaacagatgggtataaagcaccccgaggttgagtgacatcccgacagagataaagaacaaaccgagcagcaagcctttaaagggatcgatagccgtttccagttcatggcgatattcactttccgccagcagcacgcctgcaataaacgtaccgagcgccatcgacagccccaacgcatccataaacaatgcggaacccaataccagcagcagcgtcgcggcggtgaacacttcccgcacgccagaagctgcaataaaacggaataccggacgcaataaatagcgcccgccaatcagcatgccgacaaacgccagcaccttcatgccgatcttcatccagtcgaaatgttcgtctgccgaacccgccaacaacggcactaacgccagtgccgggatcaccgccagatcctgaaacagcagtaccgaaaacccgagctgcccggattcgctgcgattcatccctttctcacgcatcaattgcaacgccattgcggtcgaagacatcgcaaggccaatgccaccgaccaccgccgcctgccaggcgaaatccgtcagcatcaataatcccgccagcaacgccgcgcttaacagcacctgtgccgcgcctacgccaaaaatcgaacgccgcagttgccaaagcttggagggattcaactcaaggccgatgataaacatcaggaacaccacgccgagttccgaaaagtggaggatctcatcgacgtcgctaataaaccccagcccccacgggccaattgcaatccctgccagcaaatatcccaacacagcgccaatacccagccgcgatgccaacggcaccgcagccaccgccgcgaagagaaacagcactcctgcaagtaaaaaatcggaaccttccatcagcggcctcctggagacagcggatttgccagccagtcaccgtaggntctggcgtggctcgccagctcctgtgcgctttgccgtctcgcccagtaaataatgatgggacttaaccaatgcatccggcacatgcccgccgccagttcaaaggggcgcaggacatcgctcatcgggtagcgattcaacgcgtcataacggtaagcactttccggctcgccggtggtaatcacactacgccagtactttcccgccagttggtttcctcccggcccgctggcaaaaccacggcttaatacccggtccagccactctttcagtagcgccgggcagctataggtataaagaggatgctgaaagacaatcacctcgtgctcgcgcagtaatgcctgctcacgggggatatcaataaaaaaatcgggatagtgcgcgtaaaggtcgtgcacggtaacattgctgagctgcgtggccggtttaagcagtacccggtttgccaccgagtcctgagattccggatgggcatacagcagcaaaactttcgctggctgagacatcatccccctcccggtatggtttttgtgtatagtcgctgttttgggctaccattgcgcccggtgcggcagctcgcccatacattacattatcataatgataagttaacatagtctgaacatacggcaccttatgattgttttctcctcgttacaaattcgtcgcggcgtgcgcgtcctgctggataatgccaccgccaccatcaaccccgggcagaaagtcggcctggtgggtaaaaacggctgtggtaaatctaccctgctggcattgctgaaaaatgaaatcagcgccgacggcggcagctacacctttccgggaagctggcaactggcgtgggtgaatcaggaaacgccggcgttaccgcaagcggcgctggaatatgtcattgacggcgaccgtgaatatcgtcaactggaagcgcagctacacgacgccaacgaacgtaacgacgggcacgccattgcgaccattcatggcaagctggatgctattgacgcatggagtattcgctcccgtgccgccagcctgctgcacggcctcggtttcagcaatgaacaactggagcgcccggtaagtgatttctctggtggctggcgtatgcgtcttaaccttgcccaggcgctgatttgccgttcagacttgctgctgctcgacgaaccgactaaccacctcgatctcgatgccgttatctggctggaaaaatggctgaagagctatcagggcacgctgatcctgatctctcacgaccgcgacttcctcgatccgatcgtcgataaaattattcatatcgaacaacaaagcatgttcgagtacaccggcaactacagttcgtttgaagtacagcgcgccacccgtctggcgcagcaacaagcgatgtacgaaagccagcaggaacgcgtagcgcatctgcaaagttatatcgaccgtttccgtgccaaagccaccaaagcgaagcaggcccagagccgcattaagatgctcgagcgtatggagctgattgcccccgcgcacgtcgacaacccgttccgctttagcttccgcgcgccggaaagcctgccaaatccgttactgaagatggaaaaggtcagcgcaggctatggcgatcgcattattctcgactcgattaaactgaatctggtccccggttcgcgcattggtctgttaggccgcaacggcgcgggtaaatcgacattaatcaaactgttagccggtgaacttgcgccagtcagtggtgagataggcccggcaaaagggatcaagctcggctacttcgcccagcatcaacttgaatacctgcgcgccgacgaatcgcctattcaacatctggcacgtttagcgccgcaggaactggagcaaaaactgcgtgactacctcggcggctttggtttccagggcgataaagtaaccgaagaaacgcgccgcttctccggtggggaaaaagcccgcctggtgctggcattaatcgtctggcagcgtccgaatctgctgctgctcgacgaaccgactaaccaccttgaccttgatatgcgtcaggcactcaccgaagcattaatcgagtttgaaggcgcgctggttgtcgtttcgcacgaccgtcatttgctgcgttccaccactgacgatctctacctggttcacgatcgtaaagtcgaaccgttcgacggcgatctggaagattatcaacagtggttgagcgacgtacaaaagcaggaaaaccagaccgacgaagcgccaaaagagaacgcgaacagcgcccaggcacgtaaagatcagaagcgtcgggaagcggagctgcgtgcgcaaacccagccactgcgtaaagagattgcccgtctggaaaaagagatggagaagctgaacgcgcaactggcgcaggcagaananaaactcggcgacagcgaactgtatgaccagagccgtaaagcggagttgaccgcctgcctgcaacagcaagccagcgccaaatccggcctggaagagtgcgaaatggcatggctggaagcccaggagcagcttgagcagatgctgctggaaggccaaagcaactgatggcgcagataacgacgaccgatgccaatgaattcagcagcagtgctgaattcacccctatgcgcggctttagcaattgtcatctgcaaaccatgctgccgcgtctgtttcgtcgcaaggtgaaattcaccccgtactggcagcgactggagttgcccgacggcgattttgtcgatctcgcgtggagtgaagcccctgcacaggcgcaacataaacctcgtctggtggtgtttcacgggctggaaggcagtctcaatagcccttacgcccacggtctggttgaggcnncgcaaaagcgcggctggctgggcgtggtgatgcattttcgcggatgcagcggtgaaccaaaccgtatgcaccgcatttaccattcgggcgaaaccgaagacgccagttggtttttacgctggctgcaacgcgagtttggccatgcgccaacggctgccgtcggctattcgctcggcggtaatatgctggcctgtttgctggcaaaagaaggcaatgatctcccggttgatgcggcggttattgtctctgcgccgtttatgctggaagcctgtagctatcatatggaaaagggcttttcccgcgtttatcagcgttacttgctgaacctgttaaaagccaatgccgcgcgcaagctggcagcctaccccggaacactgccgattaatctcgcgcagttaaaatcggtacgtcgcatccgtgaatttgacgatctcatcaccgccagaattcacggctacgctgacgctatcgactattatcgtcagtgtagcgccatgccgatgctgaaccggatcgccaaaccgacgctgattattcacgccaaagacgatccgtttatggatcatcaggtgatcccgaaaccggaaagtctccccccgcaggtggagtatcaactgactgaacatggcggtcatgttggctttattggcggtacattacttcatccgcaaatgtggctggagtcacgcattcctgactggttaacaacgtatctggaggcgaaatcatgttgattccgtggcaagacctctcccccgaaacgctggaaaatttaattgaaagctttgtgttacgtgaaggcaccgattatggtgaacatgagcgtacacttgaacagaaagtcgccgacgtcaaacgccagctacagtgcggagaagcggtgctggtatggtcggagctgcacgaaacggtcaatatcatgccgcgcagtcagtttcgcgaataacctgcaaccgtcggcggacgagataataatgatagctaagtcatggagttactatgtctgccaaacatccggtcattgcggtaacaggatccagcggcgcggggaccaccaccaccagcntcgcgtttcgtaaaatattcgcgcagttaaatctgcatgcagccgaggtggaaggcgacagttttcaccgttacacccgcccggaaatggacatggcgatccgcaaagcgcgcgacgccgggcggcatatcagctacttcggccccgaagcgaacgacttcggcctgctggaacaaaccttcattgaatacggtcagagcggcaaagggaaatctcgcaaatatctgcatacctacgatgaagccgtaccgtggaatcaggtaccgggaacattcaccccctggcaacctttaccagaacccactgatgtactgttttatgaaggtttacacggcggcgtagtcacgccacagcataacgttgcgcagcatgtggacttactggtcggcgtggtgcctatcgttaaccttgagtggattcaaaaactgatccgcgacaccagcgagcgcgggcactcacgagaagcagtgatggattcagtagtgcgttcaatggaagactatatcaactacatcacaccgcagttttcccgcacccatcttaacttccagcgcgttcccaccgtcgacacttcaaacccgttcgcggcaaaaggtatcccgtcgctggatgaaagctttgtggtgatccattttcgtaatctggaagggatcgatttcccctggctgctggcgatgttgcaaggctcattcatttcccacatcaatacgttagtggtgcccggcggcaaaatgggtctggcaattgaattaattatgctgccgctggtgcaacgattgatggaaggaaagaaaatcgagtaactctgctattacgccggataaaatactatccggcttcacaacgggatagttaaatcacgcggcaaccacttcatacgagtgagtaatattcaccgctttttccagcatcaacgccactgaacaatatttctcagcagagagatcaaccgcacgcgcaaccgctgcgtctttcaggtcgcgaccggtgacgataaaatgcagattaatgtgcgtaaacaggcgtggtgcctcttcgcggcgttcagaggtcaattttacttcacaatcgaccacatcctgacgccctttttgcaggatcgaaaccacatcgatggcactgcaaccacccgccgccatcaacaccatttccatcggacttggtgctttatcgcctgagttgccgtccattaaaatctggtgaccagaggcagattcgcccagaaaagttaacccttcgacccacttcactcgcgcttgcatttttgctactccactgcgtcaattttcctgacagagtacgcgtactaaccaaatcgcgcaacggaaggcgacctgggtcatgctgaagcgagacaccaggagacacaaagcgaaagctatgctaaaacagtcaggatgctacagtaatacattgatgtactgcatgtatgcaaaggacgtcacattaccgtgcagtacagttgatagccccttcccaggtagcgggaagcatatttcggcaatccagagacagcggcgttatctggctctggagaaagcttataacagaggataaccgcgcatggtgcttggcaaaccgcaaacagacccgactctcgaatggttcttgtctcattgccacattcataagtacccatccaagagcacgcttattcaccagggtgaaaaagcggaaacgctgtactacatcgttaaaggctctgtggctgtgctgatcaaagacgaagagggtaaagaaatgatcctctcctatctgaatcagggtgattttattggcgaactgggcctgtttgaagagggccaggaacgtagcgcatgggtacgtgcgaaaaccgcctgtgaagtggctgaaatttcgtacaaaaaatttcgccaattgattcaggtaaacccggacattctgatgcgtctgtctgcacagatggcgcgtcgtctgcaagtcacttcagagaaagtgggcaacctggcgttcctcgacgtgacgggccgcattgcacagactctgctcaatctggcaaaacaaccagacgctatgactcacccggacggtatgcaaatcaaaattacccgtcaggaaatcggtcagattgtcggctgttctcgtgaaaccgtgggacgcattctgaagatgcttgaagatcagaacctgatctccgcacacggtaaaaccatcgtcgtttacggcactcgttaatcccgtcggagtggcgcgttacctggtagcgcgccattttgtttcccccgatgtggcgcagactgatttatcaccccgatattaactatgcactgcgacaaacgctggtgctatgtttgcccgtggccgttgggttaatgcttggcgaattacgattcggtctgctcttctctctcgttcctgcctgttgcaatattgcgggccttgatacgcctcataaacgttttttcaaacgcttaatcattggtgcgtcgctgtttgccacctgtagcttactgacacagctgctactggcaaaagatgttcccctgccttttttgctgaccggattaacgctggtacttggcgtcactgctgagttggggccattgcacgcaaaattgcttcccgcatcgctgctggcagccatttttaccctcagtctggcgggatacatgccggtctgggaaccgttgctcatctatgcgttgggcactctctggtacggattgtttaactggttttggttctggatctggcgcgaacaaccgctgcgcgagtcactaagtctgctgtaccgtgaactggcagattattgtgaagccaaatacagcctgcttacccagcacaccgaccctgaaaaagcgctgccgccgctgctggtgngccagcaaaaagcggtcgatctaattacccagtgctatcagcaaatgcatatgctttccgcgcaaaataatactgactacaagcggatgctgcgtattttccaggaggcgctggatttacaggaacatatttcggtcagtttgcatcagccggaagaggtgcaaaagctggtcgagcgtagccatgcggaagaagttatccgctggaatgcgcaaaccgtcgccgctcgcctgcgcgtgctggctgatgacattctttaccatcgcctgccgacgcgttttacgatggaaaagcaaattggcgcactggaaaaaatcgcccgccagcatccggataatccggttgggcaattctgctattggcacttcagccgcatcgcccgcgtgctgcgcacccaaaaaccgctctatgcccgtgacttactggccgataaacagcggcgaatgccgttacttccggcgctgaaaagttatttgtcactaaagtctccggcgctacgcaatgccggacgactcagtgtgatgttaagcgttgccagcttgatgggcaccgcgctgcatctgccgaagtcgtactggatcctgatgacggtattgctggtgacgcaaaatggctatggcgcaacccgtctgaggattgtgaatcgctccgtgggaaccgtggtcgggttaatcattgcgggcgtggcgctgcactttaaaattcccgaaggttacaccctgaccttgatgctgattaccacccttgccagctacctgatattgcgcaaaaactacggctgggcgacggtcggttttactattaccgcagtgtataccctgcaactgttgtggctgaacggtgagcagtacatccttccgcgtcttatcgataccattattggttgtttaattgctttcggtggtaccgtctggctgtggccgcagtggcagagcgggttattgcgtaaaaacgcccatgacgctttagaagcctatcaggaagcgattcgcttgattctgagcgaggatccgcaaccaacgccactggcctggcagcgaatgcgggtaaatcaggcgcataacactctgtataactcattgaatcaggcgatgcaggaaccagcgttcaacagccattatctggcagatatgaaactgtgggtaacgcacagtcagtttattgttgaacatattaatgccatgaccacgctggcgcgggaacaccgggcattgccacctgaactggcacaagagtatttacagtcttgtgaaatcgccattcagcgttgtcagcagcgactggagtatgacgaaccgggtagttctggcgatgccaatatcatggatgcgccggagatgcagccgcacgaaggcgcggcaggtacgctggagcagcatttacagcgggttattggtcatctgaacaccatgcacaccatttcgtcgatggcatggcgtcagcgaccgcatcacgggatttggctgagtcgcaagttgcgggattcgaangcgtaatgcaggctaaaccatcggataaggcatgcacgccgcatccgacatcttttgcctgatgcgtcttatttacgccccaaccaccttcgccaccgcgtgggcgaaacgttgcatcccttcatcgatatccgcatcttccaccaccagcgacggcgcaaaacgcatcacatccggtccggcattcagcaccattacgccagcctctgcgcccgcatacaggaaatcacgcgcctgacctttgtactgtggtttcagctccgcgccaattaacagccccataccgcgaatatcgctaaacacatcgtactgctgatcgatcttctgcaaatggtcaacaaaacgctggcgtttcgcctgaatgccttccagcacttcaggggtattaatgatatcaaacgccgcgcccgctactgcacaggccagaggattaccgccgtaggtggaaccgtgagaaccaggatgaaacgcagaagcaatttccgccgtggtcagcatggcgctaatcgggaagccgccgcctaacgctttcgcagaagtcagaatatccggcgtcacgccgtagtgcatgtaagcaaacaaatcgccagtccgccccatcccgcactgtacttcatcaaacaccaataatgcctgatgttgatcgcacaactcacgcaagccctgcaaaaactctggcgtcgctgccgtcacaccgccctcgccctggatcggctcaaccaccaccgcacaggtgtgatcatccatcaccgctttcactgcgtggagatcgttaaagggaacgtggatgatgtctgatggttttggcccaaagccgtcggaatattttggctgcccacccaccgaaacggtaaacagcgagcgaccatgaaaagcgttatggaaggcaataattttggttttgaacgggctatgacgcacgcaggcgtaatggcgtgccagtttaaaggcggtttcgttagcttccgtgccggagttcataaacaccacgcgttcggcaaacgtcgcctcaatcagtttacgcccaagacgcagcgccggttcattggtgaaaacgttactgatatgccacagagtttcgccctgggtttttaacgcgttcaccagcgcaggatggcaatggcccaacgccgtaactgcaatgccacccgcgaaatcgacatactccttgccttgctgatcccagattcggctgccctgaccttttaccggaatgaactctgccggagcataaatcggcaggatcacttcatcgaaagtcgcgcgtgtaattgctgtttgttcaattgccatctcatgatcaccctgttatgcataaataaatgtgaaattataatcacaaaatatgcataaaaaatcattgaatggcaatcagaaatcagcgatgcaggaaattagccagcagttgatgtccttgttcgctaagaatactttctggatggaactgcacaccttccagatcccactggcgatggcgaatccccataatctcgcgggtttcgctccaggccgtcacttcaaagcacgctggtaacgagtcaggttccactaccagcgaatgatagcgtgtcacggtaagtggatttgccagcccccgaaatacgccctcaccgttatgtgtaatcggcgaggttttgccgtgcatgacctttgcggcgcgcacaactttaccgccaaatgcctgcgccattgcctgatgaccgaggcagacgccaagaatcggcaagcgcccggcatagtggcgaataacgtcaagggagatcccggcttcatctggcgtacaggggccgggtgagatgacaactttttgtggtttaagggcgtcgatatccgccagcgtcaacgcatcgttgcgcttaaccagcacatccgcccccagttcacaaaagtactggtagaggttccaggtaaaagaatcgtagttatctataagcaggatcatggcggctccggtacgaaagaaccgcgctattttactcagattccccggcttcgcttaccactttgctaaatatcatctgcaacgcggtgagatcccccattgccccactctgatttgcctgattccaggcctctttttcgataccctgccagctcagttgatatccggcatgaatcgccagttgctcgaagaagatccgctgtgccagaccacttcccacccggaagggatgcagcacgttgatttcacaatagtaatgcgccagccgctcgacgaacttcgttttctccaggccaaccagataaccttcttcctccagatcctgcatcagggcattgccctctttttcgatataagcaaagtggcagaacggcgtatcgccctgataaatatcaacttcacgcagttgccctgcccagtcgaaaatatcctgatacagctggcgatggatagtgcgcaaatgcggtaaaccgcgcaccagcggaccaagctcaatggtcgcagcacgcagcgccgtcatttcgtaagcggtctgttccagccgttgttgctggcggatgttcagccggttacgcatgatatcaaggccaggataaagatacggatcgcgcccttcgccgaatttatcgctcatagtgactcctcagctcttcaaggcgcgctaaagcctctgcggcagtaagagtgactaaaggcatctcgacgccttcaagacggcgactggcctgaaaattacgattacgctgaagctcccagagacgggacttttgcttatcggtgagtttcttcacttgatgcctccctgaacgtgtccatttgccacaagtataagcggcaaatccgggttacgccgggagagcagaagcgcgggcaagattnnnngcgngagaaatcattacggcaggactttagcggaaaggataactaccggttttgacggcacattctggtacggaccaacgtcatgagtcggcacctgggaaatcttatcggcaacgtccatgcctttcaccactttaccaaataccgcgtaaccgaaatcacgctgaccatggtcaaggaaggcgttatcggcaacgttgataaagaactggctggtggcgctgtctttgtcagcggtacgcgccatcgcgatggtgccacgcgtgttgcgaaggccgttatcggcttcatttttgattggcgggtttggttttttctgctgcatctgctcggtgaaaccgccgccctgaatcataaagccaggaatgacgcggtgaaaggtagtgttgttataaaaaccgctgttcacataatcgacaaagttttgcacagacactggcgctttttgtttatccagctccagttcgatgttaccagctgaggttgtcaacaatacgtgcgggtcccctttcgctgccattgctgcgggagaaagagcagaaagagcgaaaacagcagccatcgccgccagggtcgatttgaacatgagatttccttaacaaacagagcagaaaaaaagcaagtgaagagattctaaatagccttcaagaacaaggccatccctttacctaattttacgtatctgaaatatatgtaacctgacgatcactttttattccgtgatcaaaatcacctcttaaaatgcaatttagcaaccgattgcaataaaacatttaaacagatcacaaaatcacctaaaatcgcccgctcgcggcatatcccgctatgccattttatttttgaacgcaggccaatcatgactaacagcaatcgcatcaagctcacatggattagctttctctcctacgcactgactggtgcgttggttattgtcaccgggatggtgatgggaaatatcgccgattatttcaatctgcctgtttccagtatgagtaacaccttcaccttcctcaacgccggcattttaatctctatcttcctcaacgcctggctgatggaaatcgtcccgttgaaaacgcagttacgttttggctttctcctgatggtgctggcggttgccggtttgatgttcagccacagcctggcgctgttctcggcggcgatgttcattctcggggtggtcagcggcatcaccatgtcgattggtacattcctggtaacacaaatgtatgaagggcgtcagcgcggttcccacctgttatttaccgactccttcttcagtatggctgggatgattttcccaatgatcgccgcgtttctactggcgcgcagcattgagtggtactgggtttatgcctgcatcgggctggtgtatgtcgctatttttattctgaccttcggctgtgagttcccggcgctgggcaaacatgcaccaaaaacggatgctccggtagcgaaagaaaagtgggggatcggcgtactgtttctctctgttgcggcgctgtgctacatcctcggtcagttaggttttatctcctgggtgcctgagtatgccaaaggcctgggcatgagcctgaatgatgctggcacgctggtgagtaacttctggatgtcatacatggtcggcatgtgggcgttcagctttattcttcgcttctttgatttgcaacgcattctgaccgtactggctggtctggctgcgattctgatgtacgtctttaacaccggaacaccggcacatatggcgtggtcaattctcgccctgggcttcttctccagcgcgatctataccaccatcatcaccctgggttcacagcagaccaaagtaccgtcgccaaaactggttaactttgtcctgacctgcggaaccatcggtactatgttgacctttgtggttaccggcccgattgttgaacatagcggtccgcaggcggcactgcttacagcaaacggtctgtacgctgtcgtctttgtgatgtgcttcctgttaggtttcgtcagccgtcaccgtcagcataacaccctgacctctcattaattgctcatgccggacggcactatcgtcgtccggccttttcctctctaaccccgctacgtgcatctatttctataaacccgttcattttgtctattttttgcacaaacatgaaatgtcagacaattccgtgacttaagaaaatttatacaaatcagcaatataccccttaaggagtatataaaggtgaatttgatttacatcaataagcggggttgctgaatcgttaaggtaggcggtaatagaaaagaaatcgaggcaaaaatgagcaaagtcagactcgcaattatcggtaacggtatggtcggccatcgctttatcgaagatcttcttgataaatctgatgcggccaactttgatattaccgttttctgtgaagaaccgcgcatcgcttatgaccgcgtacacctctcgtcttacttctctcaccacaccgccgaagagctgtcgctggtgcgcgaaggcttctacgagaaacacggcatcaaagttctggtcggcgaacgcgctatcaccatcaaccgtcaggagaaggtgattcactccagcgccggacgtaccgttttttatgacaagctgatcatggcgaccggttcctacccgtggatcccgccaattaaaggttctgatactcaggactgctttgtctatcgcaccattgaagacctcaacgccattgaatcctgcgcccgtcgcagcaaacgcggtgccgttgttggtggcggcctgttaggtctggaagccgctggcgcgctgaaaaacttaggtattgaaacccacgttatcgaatttgcccctatgctgatggcagaacagcttgatcagatgggtggcgagcagctgcgtcgcaaaatcgagagcatgggcgtgcgcgttcacaccagcaaaaacacccttgagattgtgcaggaaggtgttgaagcgcgtaaaaccatgcgttttgccgacggcagcgaactggaagtcgactttatcgtcttctctaccggtatccgtccgcgcgataagctggcaacccagtgtggtctggacgttgctccgcgtgggggtattgtcattaatgattcctgccagacttccgatccggatatctacgccatcggtgaatgcgcaagctggaacaaccgtgtatttggtctggtagcaccaggctacaaaatggcgcaggtcgccgttgaccatattctcggtagcgaaaacgcctttgaaggtgctgaccttagcgccaagctgaaactgctgggcgtagacgtaggcggtattggtgatgcgcacggtcgcacgcctggcgcacgtagctacgtttacctcgacgaaagcaaagagatctacaaacgccttattgtcagcgaagacaacaaaaccctgctcggtgcggtactggtgggcgataccagcgactacggcaacctgctgcaactggtgctgaatgctatcgagctgccggaaaacccggattntctgattctgccggcgcactcgggtagcggtaagccgtctatcggtgttgataaactgccggacagcgcgcaaatctgctcctgcttcgacgtcaccaaaggtgatctgattgctgccatcaacaaaggctgtcacaccgttgcggcgctgaaagccgaaaccaaagcgggtactggctgcggtggctgtatcccgctggtcactcaggtactgaacgcggaactggcgaaacagggcatcgaagttaacaacaacctgtgcgaacactttgcttattcgcgtcaggaactattccatttgatccgcgttgaaggcattaaaaccttcgaagaactgctggcgaaacacggcaaaggttacggttgtgaagtttgtaaaccgaccgtcggttcgctgctggcctcctgctggaacgaatacattctgaagccggaacatactccgctgcaggattctaacgacaacttcctcgctaacatccagaaagacggcacctactcggtgatcccgcgctctccgggcggtgaaatcaccccggaagggctgatggcggtaggtcgtatcgcgcgtgaatttaatctctacaccaagatcactggctcccagcgtctggcgatgtttggcgcacagaaagacgatctgccggagatctggcgtcagctgattgaagccggcttcgaaaccggtcatgcctatgcgaaagcactgcgtatggcgaaaacctgcgtgggtagcacctggtgccgctacggcgttggcgacagcgtcggcctcggcgtggaactggaaaaccgctacaaaggcatccgtacgccgcacaaaatgaagttcggtgtctccggctgtacccgtgaatgttcagaagctcagggtaaagacgtgggtattatcgccactgaaaaaggctggaacctgtatgtttgcggtaacggcggcatgaaaccgcgtcatgcggatctgctgncggcggatatcgatcgcgaaacnctnatcaaatatctcgaccgcttcatgatgttntacatccgtactgccgacaaactgacgcgtaccgcaccgtggttagaaaacctcgaaggcggcatcgattacctgaaagcggtgatcattgacgacaaactggggctgaacgcacatctggaagaagagatggcgcgcctgcgtgaagcggtagtgtgtgagtggactgaaacggtcaatacgccgtctgcgcagactcgcttcaaacacttcatcaacagcgacaagcgtgacccgaacgtgcagatggtgccagagcgcgaacagcaccgtccggcaacgccgtatgaacgtatcccagtaactctggtggaggacaacgcatgagccagtggaaagacatctgcaaaatcgatgacatcctgcctgaaaccggcgtctgcgcgctgttaggtgacgagcaggtcgcgattttccgcccgtatcacagcgatcaggtgtttgcgatcagcaacatcgacccgttcttcgagtccagcgtgctgtcacgcggactgattgcggaacaccagggcgagctgtgggtcgccagcccgctgaaaaaacagcgttttcgcttaagcgacggcttgtgcatggaagacgaacagttttccgtcaaacattacgaagcgcgagtgaaagacggcgtggtgcagctgcgcggttaatgttttaacgggaggcgcaatgcctcccctttttgcatggtcctgtaataaccttcggtatattgcaggacattttttaaactttttgttttattttttgtttttattttttaaaggataatcaaatgtttacagacactattaataagtgtgcggctaacgctgcgcgcattgcacgcctgtcggcaaataacccgctcggcttttgggtcagctccgccatggcgggcgcgtatgtgggtcttgggatcatcctgatttttacgctcggtaatttgctcgatccatccgtacgccctctggtgatgggcgcgacctttggtatcgccttaacgctggtgattatcgccggttctgagctgttcaccggacacaccatgttcctcacctttggggtgaaagcgggcaccatcagccacgggcaaatgtgggcaatcctgccgcaaacctggctgggtaacctggtcggttccgtcttcgttgccatgctctatagctggggtggtggtagcctgctgccggtagataccagcatcgttcactccgtcgcgctggctaaaaccactgcaccggcaatggtactgttcttcaaaggtgcattgtgtaactggctggtttgtctggcaatctggatggcgctgcgcactgaaggggcggcgaaatttatcgcaatctggtggtgtctgctggcatttatcgcgtccggctacgagcactccatcgctaacatgacgctgttcgcgctctcctggttcggcaaccacagcgaagcctacacgctggcgggtattggtcataacctgctgtgggtgacgctgggtaatactttatcaggtgccgtattcatgggattgggttattggtatgctacgccgaaagcgaatcgtccggttgcggacaaatttaatcaaactgaaacggctgccggttaattactaaggggtttttacgtggatcatttgcctatattttgccaattacgcgatcgcgactgtctgattgtcggcggtggtgatgtcgcggaacgcaaagcaaggttgctgttagacgcaggcgctcgcttaacggtgaatgcattagcgtttattccacagttcaccgcatgggcagatgcaggcatgttaaccctcgtcgaagggccatttgatgaaagccttctcgacacctgctggctggcgattgcagcgacggatgatgacgcgcttaaccagcgcgtcagcgaagccgctgaagctcgtcgcatcttctgtaacgtggtcgatgcgccgaaagctgccagcttcattatgccgtcgattattgaccgctcaccgctgatggtggcggtttcctctggcggtacttctccggttctggcgcgcctgttgcgcgaaaaactcgaatcactgctgccgctgcatctgggccaggtagcgaaatacgccgggcagttacgcggtcgggtaaaacaacagttcgccacgatgggtgaacgccgccgcttctgggaaaaactgttcgttaacgaccgtctggcgcagtcgctggcgaacaacgatcagaaagccattactgaaaccaccgaacagttaatcaacgaaccgctcgaccatcgcggtgaagtggtgctggttggtgcaggtccgggcgatgccgggctgctgacactgaaaggtctgcaacaaattcagcaggcagatgtggtggtctacgaccgtctggtttctgacgatattatgaatctggtacgccgcgatgcggatcgtgttttcgtcggcaaacgcgcgggataccactgcgtaccgcaggaggagattaaccagatcctgctgcgggaagcgcaaaaaggcaaacgcgtggtgcggctgaaaggcggcgatccgtttatttttggccgtggtggcgaagagctggaaacactgtgcaacgcgggtattccgttctcggtggttccgggtattaccgcagcttctggttgctcagcctattcgggtattccgctcacgcatcgcgattatgcccagagcgtgcgcttaattaccggacacttaaaaaccggtggcgagctggactgggaaaacctggcggcagaaaaacagacgctggtgttctatatggggctgaatcaggctgcgactattcagcaaaagctgattgaacacggtatgcctggcgaaatgccggtagcaattgtcgaaaacggaacagcagtcacgcagcgcgtgattgacggtacgctcacacaactgggcgaactggcgcagcaaatgaatagtccatcgctaattattattggtcgggttgttggcctgcgcgataaactgaactggttctccaaccattaatttaatcagggccagagaattctggcctttttcgtttacaactctctttatatattcagcagataaaaatataactcattaacaaaaatcatttgtttttgccccgttatattcaccgttacagcgacttacaaaattaagtcattcactcactgacgccgattaaatattcctgtatcgttcttaatgagcagtctacttatattcatataatcaatgaatattaatcaatatataatacatagggaatgtaaatgaacaaatttattaaagttgcactggtaggtgcagtactggctacgttaactgcatgtactggtcatattgaaaaccgtgataagaactgctcttacgactacctgctgcacccagcaatttctatttctaaaatcattggcggttgcggtcctactgcacagtaagtctctgacagaaatcagctaacgctgatttaattgcctgacgccctcgggattacccgagggcgtatttgtttctatatccttcttgctccccacccgtaaaaatattttcactttaatttcaattggataaccacattcatcagccacagcgcgatcctgtgcgaaattatgtgatcttcctccacattacataacatcatatgttgttatattcatcatgcattgtcatgtcaccttttaaatgactgcaaactctcccctacaacgtgttggacaagaaaaaggtatcgctatgggaagccaggaactccaacgcaagctcggattttgggccgttcttgcaatcgccgtcgggacaaccgtcggctccggtatttttgtatctgtgggtgaagtggcaaaagcggcgggcacgccgtggctgacggtgctcgcatttgtcatcggcgggttaattgtgatcccgcaaatgtgcgtatatgcggaactatccaccgcttatccggaaaatggcgcagattatgtttatctgaaaaatgccggaagccgaccgctggctttcctctccggctgggccagcttctgggccaacgatgcgccgtcattgtcgattatggcgctggcgattgtcagcaatcttggctttttaacgcctatcgatccgttgctcggtaaatttatcgccgccggattaattatcgcctttatgctgctgcacctgcgctccgttgaaggcggcgcagcgtttcagacgctaattaccatcgccaaaattatcccgttcactatcgtcattggtcttgggatcttctggtttaaagcggagaattttgccgcccctgctaccactgcgattggcgcaacgggcagctttatggcgctgctggcggggatctctgccaccagttggtcgtataccggcatggcctctatctgttatatgaccggcgaaattaaaaaccccggcaaaaccatgccacgagcgctgattggttcctgtctgctggttctggtgctctacaccctgctggcgctggtgatttccggcctgatgcccttcgacaaactcgccaattctgaaacgccgatttccgacgccctgacctggatccccgcactcggcagcaccgctgggatctttgttgccatcacggcgatgatcgtcattcttggttcgctttccagctgcgtgatgtaccagccgcggctggaatacgcgatggcgaaagacaacctgttcttcaaatgcttcggccatgtgcatccgaaatacaacacgccggatgtctccatcattttgcaaggggcgctggggatcttcttcatcttcgtttccgatctcaccagcctgctgggctatttcaccctggtaatgtgtttcaaaaataccctcaccttcgactccatcatctggtgtcgtaaacgcgacgattacaaaccgctgtggcgtactccggctttcgggctgatgaccaccctcgccattgcgtcaagcctcattctggtcgcctcaacctttgtctgggcaccgattcccggccttatctgcgccgtcatcgttattgccactggtctgcctgcttacgccttctgggcgaagcgtagccgccagctcaacgctttgtcgtaatgttatctggagaaaataaaatgttggatattgataaaagcactgtggactttctggtcaccgaaaatatggttcaggaagtggaaaaagttctcagccatgacgttccgctggtgcacaccatcgtggaagagatggtgaagcgcgacatcgatcgtatttatttcgttgcctgcggatcgccactcaacgcggcgcaaacggcgaaacatctggcagatcgcttttccgatcttcaggtttacgccatttccggctgggagttctgcgataacaccccatatcgcctcgacgctcgttgcgcggtgattggcgtttctgactacggtaaaaccgaagaggtaatcaaagcgctggagctgggccgggcctgcggcgcactcactgcggcgttcaccaaacgcgcggatagcccgattacctcggcggcggaatttagcattgattatcaggccgactgtatctgggaaattcatctgctgctctgctacagcgtggtgctggagatgatcacccgcctcgcgccgcacgcggaaatcggcaagatcaaaaacaatctcaaacagctgccgaatgcgctcggttatctggtacgcacttgggaagaaaaaggccgccagcttggtgaactggccagccagtggccgatgatttacacggttgctgcaggcccgctgcgcccgctgggttacaaagaaggcatcgtgacgctgatggaatttacctggacgcacggctgtgtgattgagagcggtgagttccgtcacggcccgctggagattgtcgaaccgggcgttccgttcctgttcctgctcggcaatgatgaaagtcgccacaccaccgaacgcgccattaactttgttaaacagcgtactgacaacgtgatcgtcatcgattacgccgcaatttcgcaaggactgcacccgtggctggcaccgttcctgatgttcgtgccaatggagtggctctgctactacctgtctatttacaaagatcacaacccggatgaacgccgctattacggtggtctggtggaatattaatcctctctcccggcccggcaacgggccggatttacgcaaggagttacccgatgaaaacaggtatgtttacctgcggccaccagcggctgcctattgaacatgcattccgtgatgcaagcgagctgggttacgatggcatcga

SEQ ID NO: 1527 - DNA, 7979 bp, Escherichia coli
  Strain O55:H7
  modified_base (2)..(3): a, c, g or t
  modified_base (31)..(31): a, c, g or t
  modified_base (2925)..(2925): a, c, g or t
gnncgcccgcacgcgttcgcgccggacttanaagcgggcggcatcaaacaaatcaaggcgctggcgcagacgtatcagatgccgattatcggttacacgccagaaaccaacggctatccgtataacatgatgctgggcgatgaacatatgcgtcgtgaaagcctggacatgatcaagctggcgatggatatggcaaaagagatgaacgcgggttatacgctgatttctgcggcccacgcgggctatctcacgccgcctaacgttatctgggggcggctggcagagaacttaagcgaactgtgtgagtacgcggaaaacatcggcatggatctgatcctcgaaccgttaacgccgtatgaatcgaacgtcgtgtgtaatgctaatgatgtgcttcatgcgctggcgctggtgccttcgccgcgcctgttcagcatggtcgacatttgcgcgccgtatgtccaggcggaaccggtgatgagttatttcgacaaactgggcgataaattacgtcatctgcatattgtcgacagcgacggggccagcgacacgcattacattcccggcgaaggcaaaatgccgctgcgggaactgatgcgcgatattattgatcggggctatgagggatactgcacagtggaactggtaacgatgtatatgaacgagcccagactttacgcccgccaggcgctggaacgctttcgcgcgctgctgccggaggatgagtgatgaaaaccctggcgacaatcggcgataactgcgtcgatatctacccgcaactgaataaagcgttttctggcggtaatgcggtgaacgtggcggtgtactgcactcgctacggtataaagccgggatgcattacctgggttggtgacgatgactacggcacaaagcttaagcaggatctcgccagcatgggcgtcgatatcagccatgtccatacgaaacacggcgttaccgcacaaactcaggtggaactgcacgacaatgatcgcgtttttggcgactacaccgaaggcgtgatggccgactttgccctgagtgaagaggattacgcctagctggcgcagtatgacattgtgcacgcggcaatctggggacatgcggaagacgcattcccacagctgcacgctgcgggcaaacttaccgctttcgacttctccgacaagtgggacagcccgctctggcagacactggtgccgcatctcgattttgcctttgcctccgcaccgcaagaagacgaagcgctgcgtctgaagatgaaagcgattgttgcccgtggcgcaggcgtggtgattgtcacgttgggtgaaaacggcagtattgcctgggatggcgtgcagttctggcgtcaggctcctgaacaggtgacggttatcgacaccatgggtgccggagattcgttcattgccggattcctttgcggctggtctgcggggatgacattaccgcaggcgatggcgcagggaacggcgtgcgcggcacaaactattcagtaccacggtgcctggtaggcataacgttggcgtgagcatcttcacgccaacgtgctgttacttgccggaaaacgaccctataatccgtgtaattcattctttatttcagggtcgattatgtcagctacggaccgctactctcatcaactcctctacgctaccgtccgccagcggctgctggatgatatcgcgcagggggtttaccaggccgggcaacagatccctaccgaaaatgagctttgtacacaatataacgtcagccgcattaccattcgcaaagccatcagcgacttagtggcagacggcgtactgatccgctggcagggcaaaggcacctttgtacaaagccagaaggtcgaaaacgccctgctgaccgtcagtggttttaccgattttggcgtctcacaaggcaaggcgacgaaagagaaagtgatcgagcaagaacggatcagcgccgcgccgttttgcgaaaagctcaatatccccggtaacagcgaagtgttccatctttgccgggtgatgtatctcgataaagagccgctatttattgatagttcgtggatcccgctgtcgcgttatcctgactttgatgagatttacgtcgaaggaagctccacctatcagttatttcaggagcgttttgacacgcgagtggtcagcgacaaaaagaccatcgatatctttgccgccacccgcccgcaggcaaaatggctgaaatgcgaactgggcgaaccgttgtttcgcatcagcaaaatcgcctttgatcagaatgacaaaccggtgcacgtctccgaactcttctgccgcgccaaccgcatcaccttaacgattgataataaaagacattaaccgtaggccggataagatgcaccagcatcgcatccggcgatgccggcgcactgaattttacatcccgcacgttcccctcaccctaaccctctccccaaaggggcgaggggaccgtccgagcgttttgatattacggcttcgccacaaaaccaatcgcttcgtacaccgcttttagcgtacgggaagcgtgcgcgctggctttttctgcgccgtctttcatcacctgttgcaggaaggcttcatcgttgcggaaacggtggtaacgttcctgcaattcagtcagcataccggaaacggcatcagccacttcgcctttcagatgaccatacatcttgccttcgaactgtttttccagttccgggatgctctggcccgttaccgcagaaaggatatccagcaggttggaaacgcccgctttgttctgcacatcgtagcgaactaccggcggctcgtcggagtcggtgaccgcgcgtttgattttcttcactaccgatttcggatcttccagcaggccaataacgttattgcggttatcgtcagacttggacatcttcttggtcggctccagcagcgacattacgcncgcgccggatttcggaataaacggctccggcaccttaaagatatcgccgtacagcgcgttgaaacgctgggcgatatcacggctcagttccaggtgctgtttctggtcttcacccaccggtaccagattagtttgatacagcaggatgtccgctgccatcagcaccggatagtcaaacagaccagcgttgatgttctcggcataacgcgcagatttatctttaaactgcgtcatgcggctcagttcgccgaagtaggtatagcagttcagtgcccagcctaactgcgcatgttccggtacgtgggactgaacaaaaatggtgcttttctcaggatcgataccacaagccagatacaaggccagcgtatccagcgtcgctttacgcagcttctgtgcatcctggcgcacggtgatcgcgtgttggtcaacgatacagtaaatgcaatggtagtcatcctgcatgtttacccactgacgcagcgcacccatgtagttaccaatagtcaattcacctgagggctgtgcgccactaaaaacgatgggcttagtcatttttcgattcctgattttcgctatgcggaagccctaatgcgggcagaaggtcatttatagactgataaattacatcaggctggctgagatcgatagcctcgccgtagttatatccgtaggttaagccaactgatgggcaacctgccgcttttgctgcctgaatatcattgcgtgagtcgccaacaaacagcatctgttgtggagcaattcccatccgctcagccaccagtaacagcgggtccggatgcggttttttgttttgcacatcatcaccaccaatcaccacgctgaagtatttggcgatatctaaggcttcgagcagcggcgcgacgaacggcgtcggtttgttggtgaccaggcctagcggcaggcctttagcctgcaacgcgcccaacgtatcggcaacgtgcgggaacaaaaacgtcccctcttcggcaacctcgccatagtaacgatcgaacagtttacgcagaatacgtacctgttcttctgccggaatgtcgtcatcaacgggcggtttacccattgttttacgcagagtcgcacgttcctgacgcgcccaggtcaatgcgcgctccatcagaacatctgcgccgttaccaatccaggtaataacgcgttcttcacctgcgacgggcaactccagcgcatacagcgccatatctaccgcagcagcaagaccgggagcactgtccaccagcgtaccgtcgagatcaaaagcgacgccgcgaatatcttcaaacttactcatgacttacctttgccagttcactgcgcatttcatcaatgacttttttgtagtctggctggtcgaagattgccgaaccggcaacgaacatatccgcgcccgccgcggcgatttcgccaatgttgttcaccttcacgccaccgtccacttccagacgaatgtcaaagccagactcgtcgatacgacgacgtacttcgcgcagtttatccagtgtttgaggaatgaaagattgaccgccgaaaccagggttgacggacatcagcaggatcacatccagcttatccatcacgtaatccagatagctcagaggtgtcgccgggttaaataccagacccgctttacagccattttctttaatcagttgcagcgtgcggtcaacatgctcggaggcttctggatgaaaggtaatgatgctggcaccagcggcagcgaaatcaggcacaatgcgatcgaccggtttcaccatcaggtgtacgtcgataggggcggtaatgccgtagttacgcaaggatttcagcaccattggcccaatcgtcagattgggaacgtagtggttatccatgacgtcaaaatgcacgacatcagcgccagctgccagggcttttgcggtatcttcacccaggcgggcaaaatcagccgacagaattgagggggcaatcaaatactgtttcatccgcttctccttgagaattattttttcgcgggtgaaacgactcctggtttgtacaaagccagcagttcgtccacctttttacgtgtgccgccgttgctgcttatactgcgtcgaactttgacgacatgcaattttgcgcgctgataccactcacgcgttaacatcgtatcgtgattggagatcagcacaggaatatggcgctcaaccagaccttcggcgatctccgccagatgcgcttgttgttcaagcgtaaaactgtttgtgtgatacgccgtaaagttggcggtcgcagacagcggtgcataaggtggatcgcaatagacgacagatgcatcatctgcgcgcgccatgctatcggcgtaagactcacaatagaaaaaggcattctgcgctttttcagcgaagtgatacaactctgcttccgggaaatagggttttttgtagcggccaaacggcacattaaactcaccgcgcagattgtaacgacacaggccgttgtaaccgtagcggttcaaatataaaaacagtaccgcccgacggaacggatcctggcttttgttgaactcttcgcggaactgatagtaaacctcggcgcaatttgtttcgggaacaaacagctcgcgtgcggcctgtacgtactcatcagtacgcatcttcacaatgttatagagactgatcaggtcgctattgatatcggcaaggatataacgagaaaagtcggtgttgagaaacaccgacccggcacctacaaaaggctcaaccagacattcgcccttgggcaaatgccgtttaatatcatcaagcaggggatacttgccccctgcccacttcaaaaaagcgcgatttttcttcatgctgactaactaattacaccttctccggctgtggagaaagctccgacagcatccagcgcttcaggcaactcccgcaacgataaaccattgcgggagataaccttgattacttcagatcggcctgtacctgacgcagcggtttcgcccacgggtttttggcctgaacatctgctggcaatgtagataccgcttttttcgcctcttctttcgaagcgtacacgccagaaaccaggacataccacggctgaccattacgcgtcgtttcatagacaacgtagtttttcagattctctttcttcgcccaaccgttcaggttgtcgtagttagaggaactgctcagctgcagagtgtaatggctggacggtgccgatttcaacgaacccacattacctgcggtcttccctccagcggctggtgttgccgtggtttgcgccggggatgccgtctgtactggagccgtagtcgccgtctcttttggtgctggcgtagaagtcgcagccggtgccttcgtgctcgccacaggagcagctggttcagtacgcttcggcgtctgtgctaccggcttcggttccgttttcacggttgcttgcggttttttcggttcaatcaccgcctgctgacgagctggacgcgtagtggccggacgttcagcagtttgcgttttcgccgtgtcacgcgatgcattgccattgcgtactggcgcgacagttgctggttcagtcggcaatgtagaattgaccgccacattgttcaactgttgctgattttgtggctgggtcagcgcattgttcaggtcaccctgcacttcaacacgttgttgaccatccgttgccgccggggtttgcccttgagtcggcgtagaagagatcggtggcagagaaacatcctgctgagtattttccgcagacgtggttcccggcgctggctgcacgccattcgcctgatcggtcgcattgccagcaagatcaatactcttctcgccagacgcggtttgatcgctggaagtggtcgagggggcttttagcgcagaaccgataccgatgatcaacagcagtagaaccagaatgccgacgcccatcatcatatactgacgagaagcgggtttactggctgcttttttgcgcttacgcggacgacgctctacgcgctcttcatccacggtttcatcttcggattcgtcaatttcttcttcgatttccggttcctcattgcgctctttttgcgcacgagtcggacggcgatcgtcagtgtcatcaagttcaatatcatcaaaattgatctgcggttcgccacgttcagtacgctcagaacgttcagaagattgacgagaacgaccagtacgacgatcgctgggatcgggtttcagctcgtcttctggtttgaattcatccatttaacaccccactaaaaggttaatgcttaccacgttgcaattaacctgaagctaatagaccgcttgataagcggcctgacctttcttgttgttacgctgattgacaatcggcaatggcgttaagaacaagctcgtgcgaaacgccgctgcgaacttcactcttaccaattgccaacggaagaattaagcgcatctctcccgcaaggactttcttgtcacgcagcatatgcggtaaatacgcctgcgcggacatttcgcgcggcccattgaccggtaacccagcccgcgtgagcagagttataatacgctgcgtttcggcagaactaaactgcccgagacgttccgacgtccgcgccgccatcaccatacccgcagcgaccgcttcaccatgtaaccaattgccataccccatttcagcttcaatggcatgaccaaaggtgtgtcccagattcagtaaagcacgtaacccggtttcgcgctcgtcggcggcgacaacttctgccttcagttcacaacaacggcgaatacagtacgccattgccggaccgtccagacgcaacaacgcatccagattctcttccagccagttaaaaaacgtaccgtcaagaataatgccgtatttgatgacttctgccagccccgacgctaactcacgcgggggaagcgttttcagacagtcgagatccaccaccactgaagcaggctggtagaacgcgccaatcatgtttttaccgaggggatggttgaccgcagttttgccgccaacggaggaatcgacctgcgacagtaacgtcgtcgggacttgaatgaaacgaacaccgcgctgataactcg

SEQ ID NO: 1528 - DNA, 19279 bp, Escherichia coli
  Strain O55:H7
  modified_base (2500)..(2503): a, c, g or t
  modified_base (15478)..(15478): a, c, g or t
gcgaagccggtcagatcgcccactacgccgccgccaagcgccaccagcgtagtatcgcgaccatgcggcttttgtaacaacgccgtaaagacggtatcgagtacagccaggcttttatactgctcgccgtcaggaaggataacgctatcgacgttaacacccgcctgttcaagtacgccgcggaccttatcgagatacagaggagccagggtttcgttggtgaccaacatgacctgctcgcccgatttcagcggtaagaatgaagctggttcattaaacaaaccagatgcgatggtaattgggtaactacgttccccgagagtaacgacaatcctctccataacgcgacatccaccttaattactgtacccgcagacgagtgtatataaagccagaattagttgctttccagcatgtgaataatctggtttgcaaccactttagcgctttgatcatcagtacgaatggtcacgtcggcaatctcttcatacagcggattgcgttcattggccaacgcttccagaacttcacgcggcggtgtttcaacgtgcagcaacgggcgttttttatcacgctgcgtgcgtgcaagttgcttttcgatcgtcgtttcaagataaacgacaacgccacgagcggaaagacggttacgcgtttcacgggatttcacagagccgccgccagtagccagcacaataccctgtttctcggtcaactcattgatgaccttttcttcgcgatcgcggaagccttcttcgccttctaaatcgaaaacccagcccacatcagctccggttcgtttctcaatctcttgatcggaatcgtaaaattccatattgagttgttgagctaactggcgcccaatagtgctttttccggcacccataggcccaaccagaaagatattgcgtttctctgccattttttcggtactactaagactattcgttaatgataaacccgcttcgctcagagagctccgcaggacatgaactgaaacctcataagatattgcgagagtcagactgaaaattatctcaatactccagcgggtttggcaactgaataaatcacccatccctctgcatatctggtcgctgcaagcgcgctgccttgctaccaccgctctggcgataaatcaccgggtaagattagcgtaaaaaagacagcaaaatgccgcctgaatgataaatcatcatcatggaaggcaggcagcgaagagcaccaactctcaaatcggtactccttgtatgctaaatacctgcgcgcgtcaaatagatgaaacacgttcagcgtaaaaacattaccgcttttacggctgtttactcactggaaaccagtcgtggcgtgataaacaccactaactcgcgtcgttcatcttcttttccgtcatgacgaaataattgcccgaaccagggaatgtcgccaagcaacggcacgctatcctgacccgatttatttttacgggtaaaaatgccgcccagcgccaacgtttctccgcttttgacctcgacctgcgtttcgatctcctgcttatcaatcgccagcacttcgccatcggcctgctgtagcacctgccccggaacgttctggctgatgtgtaatttcagccggatgcgacctttttgtaacaccgtgggcgtgacctccatccccaggacggcctctttaaattccaccgacgtcgcgccactttccccgctggaaacctgatatggaatttcgctcccctgtttaatgctggcaggctgaagatgtgaggccagcagacgcggactggcgataatatccagctgctgtttttgttcgagcgcggaaagctcaagatccagcaaacgtccgttgatgcgcccaatgttaaaaccgacatgcgttgtcgccgtcgctacggagaggtcgctaccaagcgtggtgacttgcccaacgccaccagcgtgttgcgcatcggccagcgtccatttcacgcctaactcacgcaaacttttttcattaatggtgacaatatgcgccgacagctcaacctgcccgaccggcagatccatttgcgctacccactgttcaagggcgcttaacgccgttttgttatctcgtagcaaaaggcgattggtgcgtttatcgacggtcatactccctttggcactcagtagcttctccccagctttcgccagctctccggcgtcggcgtattgcagagtaatattgcgattttccagcggcagatttgcctgcgcccgcgcctgctccgcttcctgacgggcgatattgtcattctgccaggcaatggaatgcactgagagaatgttgccctcctggcgcgttatcagtccggcgcttttcactacagtttgtagtgcctgcttccagggaacatctgttagatgtaacgacaccgtaccgctgacgtctggcgacaccaccaggttcaacttctcctgttcagccagcgcctgcaacacctgagctaccggaacgtcatccaccatcagcgtcactttttgcggcnnnnccgcctgtacgccgggtatcagcatcaacagtagtgcggctatccattgcttcatttgtatctccttgccgttgccacaaccattgtggcggttcgcagtttgtcccggtacccagcgttagtacgtctggcgtcagctgtaaaattgtccagccgttttccagcacatcgttttgctgcacccgtcgccatttcttttgcccgtcttttattacaccgatgatgcgctcgcctcgccctaccatcccctgatagcgccactggctaagttcgctaatccggcatagatcttccggcggtttaaaagggtcacgcataccggttaaaaggcacaatgcaatacctgccaacaaccagcgtttaaccctcatgcggcgtctccagttgtagggtgaacaaaagatcatcaccttccacgcttaatgaaaaacggctcacgctgacgttgcgctctgccagccgtgtaaatgccgacggcactgcttcccacagcgttttcaacgccaactcgcctccctgcgcggatggatgccagaaaaccagttgtgcgccgggcaactgaaaatccagtggcgaaaagggcagcgttttttcttcgctgaagggagtggtgtcaaccaggcgatacagtgtggcccaatgctgatgatgacttgcccgtagtcgaattaatgcgtcgcgctcttcatggtgtgtcgatgacagaaaaatgagcgtaactaacatcagcaaccagaatgcccagcaaaactggcggaggcggggtgatgtggcgaaccaccagtcaaagaacatgttcatcgctaaccttccttgttaactgatactcaaattgccagcgtccctgcgcatcctgctgcgtggccccccgctgattgagatgaaaagatgcatcctggcggagtgacgtttctagtgcgtttaacgcggtaatgcttgttgtaagccccttgatctccagcgttccctgctgccagcttatcgttgtcagccaggcgtgctcgggtaaaagcgccgccagtgcttccagcgcagattgccagtcgcgggtaaattgtcgctggcgctgcctttgcaaacgctgctcacgaatttgttggcgctccagcaaacgtggtttcgttatctgtaagctgcgggcgagttgttgttccccctgaagcaaaacggcgtctacgcgagcttcggcgctgcttgtcagacgcagtattagcgttatcccgacggccagcagcagaggcgcaacgaacatcagcaaccagaaacgaagaaaagcggtccggcgttgctgtcgccagggcaaaaaattaattggcgggttcatcagtacgccttcccaagcgccagcccagcgcgatggcaaagtctccacctggcggcggtaacggcggctgacgaacagaaacggcctcccaaggatcaaatccgccttcgccacatatcgcgacgctttcgggatcaacggataacgctgccgccagctccttcgcgctagtcatccccaccgccagtttgcgcccccagcgatagcgcgtcgcccacagccactgttcgttatcacgccaggccagacattgctgatgagaaggtaaaaaaggcaggaatcgctgtaatgcactggcatccggggtgatcgcactaacatgaacacgcaacctttctgccaaagtaagcagcgttgccagctctttgctttgcgcggcagtcacgttataggcgggactgagtgagtcttcgctgtaatcgaagcgcagggagtccggatccatatccagctcgcgagccatcgtcccggacagccaggccgtttgctcccgctcaccgagggacatcgacgggcgcggaaatgaccgctgtaatgtgcgactggcgggaaacgccaacatgatgtgatggcgctgcggcagttcgcgactccacggtaacaacgttttagccagccgctgcgcatcaacaatccgcccatctttgataatgtcgtgcgccagcggcaaccgccaccagcgttgcaaaaagcattcttttgcgccccgcacaatagcaaccgctaccgcttcttgctgttgtaaatgcaaaccaatttgccagatcttaaatgccattgtgatgatctccttatcacccgtcactctgacgggtatatcaatgcgtctggcttgcctttatactaccgcgcgtttgtttataaactgcccaaatgaaactaaatgggaaatttccagtgaagttcgtaaagtattttttgatccttgcagtctgttgcattctgctgggagcaggctcgatttatggcctataccgctacatcgagccacaactgccggatgtggcgacattaaaagatgttcgcctgcaaattccgatgcagatttacagcgccgatggcgagctgattgctcaatacggtgagaaacgtcgtattccggttacgttggatcaaatcccgccggagatggtgaaagcctttatcgcgacggaagacagccgcttctacgagcatcacggcgttgacccggcggggatcttccgtgcggcaagtgtggcgctgttctccggccacgcgtcacaaggggcaagtaccattacccagcagctggcgagaaacttcttcctcagtccagaacgcacgctgatgcgtaagattaaggaagtcttcctcgcgattcgcattgaacagttgctgacgaaagacgagatcctcgagctttatctgaacaagatttaccttggttaccgcgcctatggtgtcggtgctgcggcacaagtctatttcggaaaaacggtcgaccaactgacgctgaacgaaatggcggtgatagccgggctgccgaaagcgccttccaccttcaacccgctctactcgatggatcgtgccgtcgcgcggcgtaacgtcgtgctatcgcggatgctggatgaaggatatatcacccagcaacagttcgatcagacacgcactgaggcgattaacgctaactatcacgcgccggagattgctttttctgcgccgtacctgagcgaaatggtgcgccaggagatgtataaccgttatggcgaaagtgcctatgaagacggttatcgcatttacaccaccatcacccgcaaagtgcagcaggccgcgcagcaggcggtacgtaataacgtgctggactacgacatgcgccacggctatcgcggcccggcaaatgtgctgtggaaagtgggcgagtcggcgtgggataacaacaagattaccgatacgctgaaggcgctgccgacctatggtccgctgctgcctgccgcagtcaccagcgccaatcctcaggaagcgacggcaatgctggcggacgggtcgaccgtcgcattgagtatggaaggcgttcgctgggcgcgtccttaccgttcggatactcagcagggaccgacgccgcgtaaagtgaccgatgttctgcaaacgggtcagcaaatctgggttcgtcaggttggcgatgcatggtggctggcacaagtgccggaagtgaactcggcactggtgtcgatcaatccgcaaaatggtgccgttatggcgctggtcggtggctttgatttcaatcagagcaagtttaaccgcgccacccaggcactgcgtcaggtgggttccaacatcaaaccgttcctctacaccgcggcgatggataaaggtctgacgctggcaagtatgttgaacgatgtgccaatttctcgctgggacgcaggtgccggttctgactggcagccgaaaaactcaccaccgcagtatgccggtccaattcgcttacgtcaggggctgggtcagtcgaaaaacgtggtgatggtacgcgcaatgcgggcgatgggcgtcgactacgctgcagaatatctgcaacgcttcggcttcccggcgcaaaacattgtccacaccgaatcgctggcgctgggttcagcgtccttcaccccaatgcaggtggcgcgcggctacgcggtcatggcgaacggcggcttcctggtggacccgtggtttatcagcaaaattgaaaacgatcagggcggcgtgattttcgaagcgaaaccgaaagtagcctgcccggaatgcgatattccggtgatttacggtgatacgcagaaatcgaacgtgctggaaaataacgatgttgaagatgtcgctatctcccgcgagcagcagaatgtttctgtaccaatgccgcagctggagcaggcaaatcaggcgttagtggcgaagactggcgcgcaggagtacgcaccgcacgtcatcaacactccgctggcattcctgattaagagtgctttgaacaccaatatctttggtgagccaggctggcagggtaccggctggcgtgcaggtcgtgatttgcagcgtcgcgatatcggcgggaaaaccggtaccactaacagttcgaaagatgcgtggttctcgggttacggaccgggcgttgtgacctcggtctggattggctttgatgatcaccgtcgtaatctcggtcatacaacggcttccggagcgattaaagatcagatctcaggttacgaaggcggtgccaagagtgcccagcctgcatgggacgcttatatgaaagccgttcttgaaggtgtgccggagcagccgctgacgccgccgccgggtattgtgacggtgaatatcgatcgcagcaccgggcagttagctaatggtggcaacagccgcgaagagtatttcatcgaaggtacgcagccgacacaacaggcggtgcacgaggtgggaacgaccattatcgataatggcgaggcacaggaattgttctgattaaaaaggcgcttcggcgccttttcagtttgctgacaaagtgcacttgtttatgccggatacgggtgaacgcgttatccggctaacaaaatcgtgaaaactcaatatattgcaggaaccccataagcctgataagcattgtgcatcaggcaaacttcacgcatttacactcgcccctgccctttcaaccattcgcgcacgaggaacagcgcgctgacattacgcgcttcgttgaagtcagggtcttccagcaaatccatcatatgcgccagcggccagcgcacctgtggtagcggctctggctcatcgccttccagcgattccgggtagagatcttgcgctaccacgatattcattttgctggaaaagtaagacggtgccatgctgagcttcttcaaaaaagtcagatcgttcgcaccaaatccaacctcttcttttagctcgcggttagcggcttcgaagacgctttcacccggatcaattaatcctttcgaaaaacctaattcgtaggattcagttcccactgcatattcgcggatcaggatcaggtgatcgtccacaatcggcacaatcatcactgcttcccggttggttggacgcattcgttcataaacacgccgcacgccattgctgaactctagatccacgctctcgacggtaaacagtcgggaacgggctacagtttcaacattcagaatggtgggtttttgtaatgatttgctcatcgtgggatctatgctgtgaaatcagcggttattgtgcgatatcggacacgctttcggcaatgtgaattgcatgttatttacatttatgtaacttaataaataatcgtcctcaaatcaaattaaaagtcaataggttgaaataactccaggaatttgctgatattccgccttcagagggtttgctatgatcagcggttactgtgatgtgcttaatgatgctcaagttaaactccacgcttgccgatagccaaccgcagaatcatgtattgtgtccggtgcgactgaccacgcctgacagactaagtaagatggggaaagcatgagcaccattgtgatttttttagctgctttgctggcctgctcactacttgcgggatggctgataaaagtgcgatccagacggcgtcagctgccctggaccaacgccttcgcggatgcgcaaacgcgtaaactcacacctgaagaacgtagcgccgttgaaaattatcttgagagcctgacgcaggtattacaggtgcctggcccaacgggagccagcgcggcaccgatctctctggcgctgaatgccgaaagcaacaacgtcatgatgctgacacacgctatcacgcgttacggcatctctaccgacgatccgaataaatggcgttactacctcgattcggtagaagtccacctgccccctttctgggagcagtacatcaacgatgagaataccgttgaactgattcataccgattcgctgccgctggttatttcactcaacggtcatacgctgcaggagtacatgcaggaaactcgcggctatgccttgcaacctgttccgtccacgcaggcgtcgattcgcggggaagagagtgagcaaatcgagctactcaatattcgcaaagaaacgcatgaagaatatgcgctgagtcgtccgcgcgggctgcgtgaagcgttgctgatcgtcgcctccttcctgatgttctttttctgcctgattaccccggatgtatttgttccgtggctggcaggcggcgcgttactgctgctgggcgcaggtctgtgggggctattcgcccccccggcaaaatcctccctgcgggaaattcattgtctgcgcggtacaccccgtcgttggggattgtttggcgaaaacgatcaggaacagatcaacaatatttcactcggtattatcgacctggtctatcccgcacactggcagccatacattgctcaggatctcggtcaacaaaccgatattgatatctatctcgaccgccacgtagtgcgtcaggggcgatatctttcgctgcatgatgaagtaaaaaactttccgttacagcactggctgcgcagtacgattatcgctgcgggctcgctgctggtgctgtttatgctgttattctggatcccgctggatatgccgctgaaattcactctctcatggatgaaaggtgcgcagaccattgaagccaccagcgtaaaacaactggctgacgctggcgtgcgggtaggcgatacattgcgtattagcggtacgggaatgtgtaatattcgcacttccggaacctggagcgcgaaaaccaattcaccttttttaccgtttgactgctcgcagatcatctggaacgacgcccgctcattaccattaccagaatctgaactggtcaacaaagcgacggcattgactgaagcagttaatcgccagctgcaccctaaaccggaagatgaatctcgcgtcagcgcctcattacgttcagcaattcaaaaatccggcatggtattgcttgatgattttggcgacattgtactgaagacagcggatctgtgttctgccaaagatgactgtgtgcgactgaaaaatgcgctggtcaatctcggcaacagtaaagactgggacgcgctggtaaaacgcgccaacgccgggaagctcgatggcgtgaatgtgttattacgcccggtgagtgcggaatcgctggataacctggtggcaacctccaccgcgccgtttatcacgcatgaaacggcgcgagcggcacaatcactaaacagtccggcccccggcggattcctgattgtcagcgacgaaggcagcgattttgttgatcagccctggccttcggcatcactttacgactacccgccgcaagaacagtggaacgctttccagaaactggcacaaatgctgatgcatacgccgtttaacgccgagggtatcgtcacaaaaatcttcactgacgccaatggtacgcagcatataggccttcatccgatcccggatcgttccggcctgtggcgctatctcagcaccacgctgctgctactgacgatgctgggtagcgccatttataatggcgtacaggcctggcggcgttaccagcgtcatcgcactcgcatgatgaagattcaggcctattatgaaagctgcctgaacccgcaactgatcaccccttcagaaagccttatcgaataacacgtttgcgcggcaggttatgctaccctgtcgcgcaaattgcttcactctggagattttcctcatgcatatcaacattgcctggcaggacgtagataccgttctgctggatatggacggcacgttgctcgacctcgccttcgataactatttctggcaaaagctggtgcctgaaacatggggcgcgaaaaacggggttacgccacaggaagcgatggaatatatgcgccagcaatatcacgacgtacagcatacgctaaactggtactgtcttgattactggagtgagcaactgggtctggatatctgtgcgatgaccaccgagatgggaccgcgtgccgtactgcgtgaagataccattccgtttcttgaggcactgaaagccagcggtaagcagcgaattttgctcaccaatgcgcatccgcacaacctggcggtaaaacttgagcataccggtctggacgcacaccttgatttattactttccacccacacatttggttatccgaaagaggatcagcggttatggcatgcggtggccgaagctacgggtctgaaagctgaaagaacgctgtttattgatgacagcgaagcgattctcgatgctgccgcgcaatttggtattcgttactgcctcggcgtgactaatcctgactcagggattgccgagaaacagtatcaacgccatccgtcactgaatgactaccgccgcctgatcccctcgctaatgtgaaggagacgccatgaaagaaaaacctgctgttgaggttcgactggataaatggctatgggctgcccgtttttataaaacccgcgcgctggcccgtgaaatgattgaaggcggtaaggtgcattacaacgggcagcgcagcaagccgagcaaaatcgtcgagctgaatgccacgctcactctgcgccagggaaatgacgaacgcacggtgattgtaaaggcgattactgaacagcgtcgccccgccagcgaggcagccttgctgtatgaagagactgcggaaagtgtagagaaacgcgaaaaaatggcgctggcacgtaaacttaatgccttaaccatgccgcacccggaccgacgcccggacaaaaaagagcgccgcgacctgttacgatttaaacacggcgacagtgaataactgtcacctgcaagagagatgattatgccgcaacatgaccaattacatcgctatctgtttgaaaactttgccgtgcgcggcgaactggtaaccgtttcggaaaccctgcaacagatccttgagaatcacgattatccgcagcccgttaaaaacgtgctggcagaactgctggttgcgaccagcctgttaaccgctacgctgaagtttgatggtgatatcaccgtacagctgcaaggcgacggtccgatgaatctggcggttattaacggtaacaacaaccagcagatgcgcggtgtggcgcgcgtgcagggcgaaattccagaaaatgccgacctgaaaacgctggtcggcaatggttacgtggtgatcaccattaccccgagcgaaggtgaacgctatcagggcgtggtgggtctggaaggtgataccctggcggcctgcctggaagattactttatgcgttctgaacagctgccgacgcgcctgtttattcgcaccggcgacgtagacggcaaaccggctgcaggcggtatgttgttgcaggtaatgcctgcgcaaaatgcccagcaggacgactttgaccacctggcgacgctaaccgaaaccatcaaaaccgaagaactgctgaccttaccggcaaacgaagtgttgtggcgtttgtatcacgaagaagaggtgacggtttacgatccgcaggatgtggagttcaaatgcacctgctcgcgtgaacgttgcgccgatgcgctgaaaacgctgcctgatgaagaagtcgatagcatcctggcggaagatggcgaaattgacatgcattgtgattactgcggtaaccactatctgttcaatgcgatggatattgctgaaatccgcaacaacgcgtctccggcagatccgcaagttcattaatgagtatgtccggcagagagagctctgccggattttacgactaatacacctgatgcgctttgtcactcattcagattcacatccagcctttcaccatccactacaagatcgcgccacgctttaggcttcgttcccagttttccatccttcgcagctgtgagtaatttttctttcgttatatcacgcggaagtaaactcatcgtaagctcttgccattctttcttgtcaggatcaaagccatagacaatgtatctttcatcatcaaaggcaaagaggatccgctctgccctgccatcactattcagatcttgctcgaccagtacgcaggcgtctttttcaatacaggtcatcacgttatagcgatcctggattaaggccgaccagaatgtcgcatccggtttaccagaaccaggggcaattaacacattttcggctaatactttttccgatatctgttgctgaagatgttgctctccatctaacgccatcagtagatcccgcgcgcgtttcgggtctttcatatactcggcatcgcttttcagcgactcaagcgccgcacgtccatagcgaccgctgtgttcgagcatgtagatagttacctggtctggcgtgtttttgccgctctgataacgcgccatatgactgttcacactaatgcgcatactgtccagcaccggcgaattaagaagcaccagtattaccaacaccaataacgaaaccgcaaggttcactttgccctgaagaacaaggggattttgccctttacgccagacgatactgacaaaataccccagcgaccataccagtaacaccagcaccgccagcgcgccctgcaagcggtcgacagtccagccgtactgagcgacccgcagccataacgcccaggcggcgatgaacacatacagcggagcaaccagcagagcggttttaatcaggcaacgcaacggccccgtccagggaagtgacgctttttgcggatcgcggacaatagccattaagatcaattgcaaaaaggccagcgttaacagcaacccggcggcggagatgtggcgagaaatcgcactcaggcctgtaaacggcagggtgatgataaacatcagggttagcaatgatactaacggcagcaaccccgtggcgattaacgtgaacaacttttgaatagagtcgattaaacgtgactgtgttcgcgcgaggatcaccgccagcgcggtaaccagacctaacgtgagataaataaaccagtcggttgcaaaaaagagcgttttgaaaaacgtgatgccaacaagtttaaacaactcactccacagtaaaagcaccagccacgtcagaccattggcgagaaaaatcaccagtaatataagtacgttatgccatactgactggtaaaaatagcgatagcggctactgtcattgcggatgcgaaggctttgttgtatccacggtagcaacaacattgccatcagcagcagatagcaaccaaaatcccaaagcgccttttcagctctccaggggttcatgccatcagtttgccacttcagccagccgctcatccccagcgtggcaataaacaccagcgccagccatccccaaaggcgcttctgtttaaaagagatcacggagaagagtaaaacggatgaaaacgcgacggtcgcaggcacgccataaacaatccaactgtgattttttccggaaagccaggcgatcagcaggtagcaaaccagaccctgaagtaatccggtagcaatcatcccccagcgtgttgcgggtgaaagttcaacgttatccatgttggttatccagaatcaaaaggtgggttaattatcgcatccgggcagtagtattttgcttttttcagaaaataatcaaaaaaagttagcgtggtgaatcgatactttaccggttgaatttgcatcaatttcattcaggaatgcgattccactcacaatattcccgccatataaaccaagatttaaccttttgagaacattttccacacctaaaatgctatttctgcgataatagcaaccgtttcgtgacaggaatcacggagttttttgtcaaatatgaatttctccagatacgtaaatctatgagccttgtcgcggttaacacccccaaaaagactttactattcaggcaatacatattggctaaggagcagtgaaatgcgcgttaacaatggtttgaccccgcaagaactcgaggcttatggtatcagtgacgtacatgatatcgtttacaacccaagctacgacctgctgtatcaggaagagctcgatccgagcctgacaggttatgagcgcggggtgttaactaatctgggtgccgttgccgtcgataccgggatcttcaccggtcgttcaccaaaagataagtatatcgtccgtgacgataccactcgcgatactttctggtgggcagacaaaggcaaaggtaagaacgataacaaacctctctctccggaaacctggcaacatctgaaaggcctggtgaccaaacagctttccggcaaacgtctgttcgttgtcgacgccttctgtggtgcgaacccggatactcgtctttccgtccgtttcatcaccgaagtggcctggcaggcgcattttgtcaaaaacatgtttattcgcccgagcgatgaagagttggcaggtttcaaaccagactttatcgttatgaacggcgcgaagtgcactaacccgcagtggaaagaacagggtctgaattccgaaaacttcgtggcttttaacctgaccgagcgcatgcagctgattggcggcacctggtatggcggcgaaatgaagaaagggatgttctcgatgatgaactacctgctgccgctgaaaggtatcgcttctatgcactgctccgccaacgttagcgagaaaggcgatgttgcggtgttcttcggcctttccggcaccggtaaaaccaccctttccaccgacccgaaacgtcgcctgattggcgatgacnaacacggctgggacgatgacggcgtgtttaacttcgaaggcggctgctacgcaaaaactatcaagctgtcgaaagaagcggaacctgaaatctacaacgctatccgtcgcgatgcgctgctggaaaacgtcaccgtgcgtgaagatggcactatcgactttgatgatggttcaaaaaccgagaacacccgcgtttcttatccgatctatcacatcgataacatcgttaagccggtttcaaaagcgggtcacgcaacgaaagttatcttcctgaccgcagacgcctttggtgtgctgccaccggtttctcgtctgactgccgatcaaacccagtaccacttcctctctggcttcaccgccaaactggccggtactgagcgtggcatcaccgaaccgacgccaaccttctccgcttgcttcggcgcggcattcctgtcgctgcacccgactcagtacgcagaagtgctggtgaaacgtatgcaggcggcgggcgcgcaggcttatctggttaacactggctggaacggcactggcaaacgtatctcgattaaagatacccgcgccattatcgacgccatcctcaacggttcgctggataatgcagaaaccttcactctgccgatgtttaacctggcgatcccaaccgaactgccgggcgtagacacgaagattctcgatccgcgtaacacctacgcttccccggaacagtggcaggaaaaagccgaaaccctggcgaaactgtttatcgacaactttgataaatacaccgacacccctgcgggtgccgcgctggtagcggctggtccgaaactgtaatgatttgaagctggagaatatctatccagtatcttatagaaagcaaaacgggaggcaccttcgcctcccgtttatttacccttcttttgtcgtgccctgcgcccgcgttaccggcacaggcagccaggcgcgaatggaaagcccgccccgctcgctggtgccaagctccagcatcccgttatggttatccacgatacgctgcacaatcgccagccctaatcccgtgccgctaatggtgcgtgcactgtcgccgcgaacaaacggctggaaaaggtgcttacgttgttccggcgcaattcccggaccgtcatcttccacctggaaccaggcgcgattcggctccgtcccgctgctgactttgatccagccattgccgtaacgggcggcgttgaccaccatattcgccaccgcgcgtttgatcgacagcgggtgcattttcacttcaatgctgccggggtaaagcgcggtttcaatttcccgctcatagccactttcggcagcaataacctcaccgagtactgcgttgagatccgccatttccatcggcatctcctgtccggtgcgcaggtagtcgataaactgctcaatgatggcattgcactcctcgatatctttattgatcgattctgccaggtagccatcctgctcgctcatcatctcggtcgccaggcgaatacgcgtcagcggtgtacgcaagtcgtgacttacccccgccatcagcagcgtgcggtcatccgccagttgcttaacaccagccgccatatggttaaaggcgcgggtaacggaacgcacctcggacgcgccatactcacgcagcggcggcggaataatccctttaccaacctgcaaggctgcgtgttcgagatcgaccaacggtcgattctggatacgaataaacagccacgccccgcctatcgccaatagcataatcgccaacgtatagcggaacagcggagagaaatcgccctgatgaatttcggtcagcggcacgcgtacccagatattgggcgacagccaggttttcagccagacgacaggcgaacttttgttgacctcaacgcgcacttccgtcgggccgcccagttgctgtgccatctgatggcttaagaattcatagtgttgcgcccaacgcagacctgcctcttcggcagcctcgttggagtagagagagatccccagctcacggtagatctcccgacggaaagcgggaggcacaaccaactgcgtgccgtcctccagttgcagtttgtcggtcatcaacatacgcacttcgtacgcgaggactttattaaactgctggaggctcggcaaaatcgcgaagttcagcaccaccagataagtcgtcaccaggctggcgaacagcaaggtgacgatgagcaataacgtacgggcaaatgaacttcgtggcgagaagcgcaatcgcctcatgctttagagccgtccggtacaaagacgtagcccaggccccaaacggtctgaatgtaacgcggatgcgctggatcttcttccaccatgcggcgcagacgagaaatctgcacgtcgatggagcgttccattgcggaatattcacgaccacgggcaaggttcatcagcttatcgcgggagagcggctcacgcggatggctgaccagtgccttcagtaccgcaaactcaccgctggtgagcggcatcggctcgtcttcgcggaacatttcgcgcgtaccgaggttaagtttgaacttaccgaaagcaattaccgcctcttcctgtgacggtgcgcctggtagctcgttcgcctgacgacgcagcaccgcacggatacgggccagcagttcacgcgggttaaacggttttggaatgtaatcgtcagcgccaatctccaggccaacgatacggtccacttcttcccctttcgccgtcaccataatgatcggcatcgggttgctctgactacgaagacgtcggcaaatcgacaagccatcttcaccaggtaacattaaatccagtaccataagatggaaagattcacgagtcagcaggcgatccatctgttctgcattagcgacgcttcgaacctggaagccttgttcggtgagataacgttccagcagcgcacgcaggcgcatgtcgtcatcgaccaccagaatcttgtagttctcttgcattgtttgtactcccaaaggttcgcaacaatttgtaagcgtgtattcttaaaaaagctcacgttcgtcaccagctaaatctggtatgaatttcagcctaaattgttacaaagcatattaaacagcagcttaagtatacaatttattcggcgaaacattattgattctgttgatatgatcacgttatacccaatgtgcgcattatcaaacagacaaagggaatcaacgagatgaaaacgcccctggttacccgggaagggtatgaaaaactcaaacaagagcttaattatctctggcgtgaagaacgcccggaggtcacaaaaaaggtgacctgggccgcaagtctgggcgaccgcagcgaaaatgctgactatcagtataataaaaagcgcctgcgtgaaatcgaccgtcgcgtgcgctatctcactaaatgcatggaaaatctcaaaatcgtcgattactccccgcagcaggaaggcaaagtcttttttggcgcgtgggtggagattgaaaacgacgatggcgtgactcaccgtttccgtattgtcggctacgatgaaatttttggccgtaaagattacatctctatcgattccccgatggcccgcgcattgctgaaaaaagaagtcggcgatctggctgtggtgaatactcctgccggggaagcgagctggtatgttaatgctatcgagtacgtgaaaccgtaaggaagagtcttaacctcctgccgatggctggcatttttgccagccagtccgtataactatcccctgatttttgatccgaaaagatgaactcaaaccatgatgaatgattcgttctgccgcattattgcgggtgaaatt

SEQ ID NO: 1529 - DNA, 28146 bp, Escherichia coli
  Strain O55:H7
  modified_base (6592)..(6592): a, c, g or t
  modified_base (9729)..(9729): a, c, g or t
  modified_base (10609)..(10609): a, c, g or t
  modified_base (12445)..(12445): a, c, g or t
  modified_base (16858)..(16858): a, c, g or t
  modified_base (16978)..(16978): a, c, g or t
  modified_base (19138)..(19138): a, c, g or t
  modified_base (21620)..(21620): a, c, g or t
  modified_base (22017)..(22017): a, c, g or t
  modified_base (22646)..(22646): a, c, g or t
  modified_base (24840)..(24840): a, c, g or t
  modified_base (25089)..(25089): a, c, g or t
  modified_base (25102)..(25102): a, c, g or t
  modified_base (25105)..(25105): a, c, g or t
  modified_base (26484)..(26484): a, c, g or t
  modified_base (26486)..(26486): a, c, g or t
gcgcccggaacaggttgacgctgccgttcgcctgcttgacgaagggaataccgtgccttttattgcacgttatcgtaaggaaatcaccggcggtctggatgacacgcagctgcgtaatctggaaacgcgtctgggatacctgcgcgagctggaagagagacgtcaggcgatcctcaagtccatttccgagcaaggcaaactcaccgatgatctggcgaatgccatcaacgccaccctaagcaaaaccgaactcgaagacctctacctgccctacaaacctaaacgccgcacccgcgggcaaatcgccattgaagcagggcttgagccgttggctgacctgctgtggagcgatccgtcacacacgccagaagtcgccgctgcgcaatatattgatgccgataaaggcgtggcagataccaaagccgcgctggacggcgcgcgctatatcctgatggaacggtttgccgaagatgccgcgctgctggcgaaagtgcgtgattatctgtggaagaacgcacatttggtttctacggtggtgagcggtaaagaagaggaaggggcgaaattccgcgactatttcgatcatcacgaaccgttgtccacggtgccttctcaccgcgcgctggcgatgttccgtgggcgtaacgaaggcgtacttcagctttcgctgaatgccgatccacagttcgatgagccgcccaaagagagctattgcgagcaaatcatcatggatcaccttggcctgcgcctgaacaatgccccggcggatagctggcgcaaaggcgtggtgagctggacgtggcgcatcaaggtgctgatgcatctggaaaccgaactgatgggcaccgtgcgcgaacgtgcggaagatgaagcaatcaacgtctttgcccgtaacctgcacgatctgctgatggcggcccctgccggactgcgtgcaacgatgggcctcgatccgggtctgcgtaccggggtaaaagtggcggtggtcgatgccactggcaaactggtagcgaccgataccatttacccgcacaccggacaagccgcaaaagcagcgatgactgttgctgcgctgtgtgaaaagcataacgttgaactggtggcgatcggcaacggtacagcttcccgcgaaaccgaacgtttctatctcgacgtgcagaagcagttcccgaaagtgaccgcacagaaagtgatcgtcagcgaagctggcgcgtcggtttactcggcttccgagctggcagcgcaggagttcccggatctcgacgtttcgctgcgtggcgcggtttctatcgcccgccgtttgcaggatccgctggcggagctggtgaaaatcgatccgaaatctatcggcgtaggtcagtatcagcatgacgtcagccagacgcaactggcccgcaaactggatgcagtagtagaagactgcgtaaacgccgttggcgtcgatctcaacaccgcttctgttccgctattaactcgcgtggcgggcctgacgcgaatgatggcgcaaaacatcgtggcctggcgcgatgagaacggccagttccagaaccgtcagcaactgctgaaagtcagccgtctggggccgaaagccttcgagcagtgcgcgggcttcctgcgcattaaccacggtgacaacccgctggacgcctctaccgttcacccggaagcctatccggtggtggaacgcattctggcagcaacacagcaggcactgaaagatctgatgggtaacagcagcgaactgcgtaacctgaaagcgtctgactttactgatgaaaaattcggtgtgccgacagtaactgacatcatcaaagagctggaaaaaccgggtcgcgatccgcgtccggaatttaaaaccgctcagtttgccgatggcgtcgagacaatgaacgacctgcaaccgggtatgatcctcgaaggcgctgtcaccaacgtcaccaactttggcgcgtttgtcgatatcggcgtgcatcaggacggcctggttcacatctcttcattgtcgaacaagtttgtggaagatccgcataccgtggtgaaagcgggcgacattgtgaaggtgaaagtgctggaagtggatcttcagcgtaaacgtatcgccctgactatgcgtctggacgagcagcctggcgaaaccaactctcgtcgcggcggcggtaacgatcgcccgcaaaacaaccgcccggcagccaaaccacgcggtcgtgaagcgcagcctgccggtaacagcgcgatgatggacgcgctggcggcagcaatgggcaaaaaacgttaaacgcccggactggcccctaaacctgcgcgataaggcgttcacgccgcatctggcaacgaacgccttgcctgacataaaagtgccggagaatatctccggcatatttattccacagccaaactcacaatatatttcgttaatatttatcacttcattaacaactgaaaccttaattaaacattagccagtcctggtaattcgctattcgaattatattttcgctgcgatataaccttgagccacatcaacattgagtcagattattattcaaaccaacattcgcacacattttaagtattgctgatagaaaccattctcattatcattgtactgttgattatttaatctctccttcgttggcaaatcatctggtctcatgtcgctgtcaaacgccccatgaggtagttatccagttaatgagaaacaagtaggcacctatgcaatacactccagatactgcgtggaaaatcactggcttttcccgtgaaatcagcccggcatatcgccaaaaactgctttctcttggcatgttacctggctcctcttttaatgtggtgcgcgtcgctccactcggcgaccccattcatatcgaaacccgtcgtgtgagcctggtattacgcaaaaaagatctggccttattagaagtggaagcggtttcctgttaatacggtgataacaacaatgaaaaaattaaccataggcttaattggtaatccaaattctggcaagacaaccttatttaaccagctcactggcgcacgtcagcgtgtaggtaactgggctggcgttaccgtcgaacgtaaagaagggcaattctccaccaccgatcatcaggtcacgctggtggacctgcccggcacctattctctgaccaccatctcatcgcagacctcgctcgatgagcaaatcgcctgtcactacattttgagtggcgacgccgacctgctgattaacgtggtggatgcgtctaaccttgagcgtaacctgtacctgacgctacaactgctggaactcggcattccctgcatcgtggcactgaacatgctcgacattgccgagaagcaaaatattcgtattgaaattgatgctctgtcggcgcgtcttggctgcccagtgatcccgctggtttcaacccgtggtcgcggtattgaagcgctcaagctggcgattgatcgctataaagctaacgagaatgtggaactggtgcattacgcacagccgctactcaacgaagcagattcactggcaaaagtgatgccttccgacatcccgctgaaacaacgtcgctggctgggcctgcaaatgctggaaggcgatatctacagccgcgcctacgccggtgaagcgtcgcagcatcttgatgccgccctcgcccgtctgcgtaatgagatggacgatccggcgctgcacattgccgatgcgcgttaccagtgcattgctgccatctgtgatgtggtaagcaacaccctgacggcagaacccagccgtttcaccactgcggtagataaaatcgtgctcaaccgtttcctcggtctgccgattttcctctttgtgatgtacctgatgttcctgctggctatcaacatcggcggggcgttacagccgctgtttgacgtcggctccgtggctctatttgtgcatggtattcaatggattggctacacgctccacttcccggactggctgactatcttcctcgcccagggcctgggtggcggtattaacaccgtgctgccactggtgccgcagatcggcatgatgtacctgttcctctccttccttgaggactccggctatatggcgcgtgcggcgtttgtgatggaccgcctgatgcaggcgctgggcttgccggggaaatcctttgtgccgctgatcgtcggtttcggttgtaacgtaccgtcggtaatgggtgcacgtacgcttgatgcaccgcgtgaacgtctgatgaccatcatgatggcaccgtttatgtcctgcggcgcgcgtctggctatcttcgcagtattcgcggctgccttcttcgggcagaacggtgcgctggcggtcttctcgctgtatatgctcggtatcgtgatggcggtgctgactggcctgatgctcaagtacaccatcatgcgcggtgaagcgacgccgtttgtcatggagctgccggtctaccatgtaccacacgttaaaagcctgattatccagacctggcagcgtctgaaaggcttcgttctgcgtgctggtaaagtgattatcatcgtcagcattttcctgagcgctttcaacagcttctcgttgagcgggaaaatcgtcgataacatcaacgactcggcgctggcttccgtcagccgggtgatcaccccggtcttcaagccgattggcgtgcatgaagataactggcaggcaacagttggcctgtttacgggtgcaatggcgaaagaagtggtggtgggtacgctcaacaccctctacaccgcagaaaatattcaggacgaagagttcaatccggcggaatttaacctcggtgaagagttgttcagcgcggtagatgaaacctggcagagcctgaaagacaccttcagccttagcgtactgatgaaccccattgaagctagcaaaggcgacggcgaaatgggtaccggggcgatgggcgtgatggatcagaaattcggtagcgcagctgccgcatacagctacctgattttcgtcctgctgtatgtaccatgtatctcggtgatgggagccatcgcccgtgaatcaagccgtggctggatgggcttctccatcctgtgggggctgaatatcgcttactcactggcaacattgttctatcaagtcgccagctacagtcagcacccaacttacagcctggtgtgcattctggcggttatcctgtttaacatcgtggttatcggtctgctgcgccgcgcgcgtagccgggtggatatcgaactgctggcaacccgcaagtcggtaagtagttgctgcgcagccagcaccaccggtgattgccattaatggcttcacttattcaggtgcgtgatttgctggcgttacggggccgtatggaagcggcccagataagccagacattgaacactccacagccaatgattaacgccatgctgcaacaactggaaagtatgggcaaagccgtgcggattcaggaagaacctgacggctgcctctccggcagttgtaaaagctgcccggaaggaaaagcctgtctgcgcgagtggtgggcgctgcgttaaccatactccatcgcctgttttgaaaagcccggtatgcgtttgcatccgggcttttttgcgtgcggctttccataaaaatgcaattcttgcagcgcgacgtaagttcctctgaaagcgtctcgcagggatgaaaactggctaatgcacaggtgtggagtggcgcgtagagtcgcggcattcaaacaacaggtgaaggaacgccatgagcaaaaagcagagttccaccccacacgatgcgctgttcaaactctttttacgccaaccggagacggcacgcgattttcttgcgtttcatttaccagcacccattcacgcgctctgtgatatgaaaaccctcaagctggagtcgagcagctttattgatgacgatctgcgtgaaagctattccgatgtgctgtggtcggtgaaaacagaacaaggaccaggatacatctattgtctgattgaacatcaaagcacctcaaacaaactgatcgcatttcgcatgatgcgttacgctattgccgcaatgcaaaatcaccttgatgccggatacaaaacgttgccgatggtggtgccattgttgttttaccacggtattgaaagcccctatccctattcgctgtgttggctggattgtttcgccgatcccaaactggcaaggcagctttatgcctccgcatttccgctgattgatatcaccgtcatgcctgatgatgaaatcatgcagcaccgacgcatgacgctgctggagttaattcaaaaacatattcgtcaacgcgacctgatggggctggtagagcaaatggcctgcttattaagtagtggatacgctaatgacagacaaatcaaagggctgtttaattacatactgcaaaccggcgatgcggtacgttttaacgattttatcgacggcgttgccgaacgatcaccgaaacacaaggagagtttaatgactattgcggaaagattgcggcaggagggggaacaatccaaagccctgcatatagccaaaataatgcttgaatccggagtccctcttgcagacatcatgcgctttaccgggctgtcagaagaagagttggctgcggcgagtcantaaagttctgtctcgccattcaaaagtgcctacaccctctgcttcaacgccaccagcacgtgacgaaactcgaccggatgcgaaataaacggcgcatgagccgctttggcgaagatgtatgactcgctgtgtggccagagtttatccagcatcggcaccactttgcgcggcaccagaccatcgagatagccatacagtcgcaaaaacggcatgggtacgttttgcagcggcaagcggagatcaaccgttttgaggatttccagcccaccattgagcacgtcaacctccggcatcggtaacgccagaacggttttcttcaacgcccgcgcatcctgacgcgccgtttcagtacccatggtttgtaacgcaaggaaccgttccaccgtacgctgaaaatcatcactgagttgctgctgaaatcccgccagcacgtccggttttatccccggccactcgtcacgagcactaaaacaaggtgacgacgccacggtgaccagcgcctgaacacgctcgggatgggttaacgcaatctggcttgccaccagcccgcccagactccagcctaaccaaatggctttatctggtgcctgtcgcagcacggcttcggccatctccgcaagtgacagcgcaccaaatccccggctacgcccgaagccgggcaggtcaacaagatgcagcgtaaaatgcgagctaagttcctcgtcaatgcaacgccacacttcagcattcagtccccatccgtgcagcagcacaagatgaacattcccctgacctttggtctgccaccagatgttattcatccgctattgttctcttttgacttacaaggatgaacatatgctaacagtaccgggattatgctggctatgccgaatgccactggcattaggtcattgggggatttgttcggtctgctcacgcgccgcccgtacagataaaacgttatgcccacaatgtggattacccgccacacactcccatcttccctgcggtcgctgcctgcaaaaaccgccgccctggcaaagactggtcacggttgccgactatgcgccgccgttaagtctgctcatccaccagcttaagttttcccggcgcagcgaaatcgccagcgccctgtcacgtctgttactattggaagtcttacacgctcgtcgcaccaccgggttgcaattgccggatcgtatcatcagcgttccgttatggcagcggcgtcactggcgtcggggatttaatcagagcgatttgctgtgtcagccgttatcacgctggttgcactgccaatgggatagcgaagccatcacacgtacacgggccactgcgacccagcattttcttagcgcccggctacgcaggcgcaacctgaaaaatgcctttcgccttgaattgcctgtgcaaggtcgccatatggtgattgtggatgatgtcgttaccaccggaagtaccgtcgcagagattgcgcagttgcttttacgcaatggtgcggcgactgtccaggtctggtgcctttgtcgaaccttgtagagcctcgatgatgggcgtattataaccaactaaaatagtcaactattaggccattactatgatccgtatttccgatgctgcacaagcgcactttgccaaactgctggcaaatcaggaagaagggacacaaatccgcgtatttgtgattaaccctggcacgcctaacgctgaatgtggtgtttcttattgtccgccggatgccgtggaagccaccgacaccgccctgaaatttgacctgctgaccgcgtatgttgatgagttaagcgcaccatacctggaagatgcagagatcgattttgttaccgaccagttgggttctcagctaacactgaaagcgcctaacgccaaaatgcgtaaagtggcagacgatgcaccactgatggagcgcgtggagtatatgctgcagtcgcagatcaacccacagcttgctggtcacggtggccgcgtttcactgatggaaatcaccgaagacggttacgccattctgcaatttggcggcggctgtaacggttgttccatggtcgatgtgacgctgaaagaagggatcgagaagcagctactaaacgaattcccggagctgaaaggtgtgcgcgatctcaccgaacaccagcgcggcgaacactcctactactaagttatcccctcttttgtagattgcccgatgcgacgctaaagcgtcatttcgggcctacgttgaacatgtgccagacgttggcgcagcattgctttggcaaatccctcccttcgtttccccgcgataatatgaccaacctctcataatttaaatttaccccgctctggtgattctcaaacgccagatgttacccgtatcattcacgtgggtaccaaacatactcctgacatctgactacaataattagttttagtgggtatcagtcgtggtgccgcaatatctctgttcccgattgggataattagagcttgtcgtcagaaaattgacgttacccataacaaatgaaaggccaggtaaatcatgccattagtcattgttgctatcggtgtaatcttgttattactcctgatgatccgcttcaaaatgaacggcttcatcgctctcgtcctcgtggcgcttgctgttggattaatgcaagggatgccgctggataaagttattggctccatcaaagccggtgtcggcgggacgctcggtagccttgccctgatcatgggttttggcgcaatgctgggcaaaatgctggcagactgcggtggcgcacaacgtatcgccaccacgctgattgccaaatttggtaaaaaacacatccagtgggcggtggtactgaccggttttaccgttggttttgccctgttctatgaagtgggctttgtgctgatgctgccgctggtgtttaccatcgcggcttctgcgaatattccactgctgtatgttggtgtaccaatggcagctgcactgtctgtgacccacggcttcctgccaccgcatccgggtccgactgcgattgccaccattttcaatgccgatatgggtaaaaccctgctgtacggtactattctggcaatcccgaccgtgattctcgccggtccggtttacgctcgcgtgttgaaaggtatcgataagccaattccggaaggtntctacagcgcgaaaaccttcagcgaagaagagatgccgagctttggcgtcagcgtctggacctctctggtgccggtagtactgatggcgatgcgtgcgattgccgaaatgatcctgccgaaaggtcacgctttcctgccggtagcggagttcctcggtgacccggtaatggctacgctgattgccgtgctgattgcgatgttcacctttggtctgaaccgtggtcgttcaatggatcagattaacgacacgctggtttcttccatcaaaatcattgcgatgatgctgttgatcatcggtggtggcggtgcgttcaagcaggtgctggtagacagcggcgtggacaaatacattgcttccatgatgcacgaaaccaacatttctccgctgctgatggcctggtcgattgctgccgtactgcgtatcgcgctgggttccgcaaccgttgcggcaatcactgcgggtggtatcgcggcaccgctgattgcaacgacgggtgttagcccggagctgatggttattgcggtgggttccggtagtgtgattttctctcatgtgaacgatccgggcttctggctgttcaaagagtactttaacctgactatcggcgagaccatcaaatcctggtcgatgctggaaaccattatctcggtgtgcggtctggtaggctgtctgctgctgaatatggtgatttgataacactgactgccggatgcatcgcatccggcatcaaccgcactctacttcttcttcgctgcagctctgcgccgtctgtccaaatccttcagcaacttgttcacgccatcatcggcaaacatcgtctcaagcgttgcggaaagcttgcgtcgccagtttttatactggtaactggtgccaggaanattcaccggttcggccatatccagccagtcttccggctgtagtcctaacagagcactgttactgtcggcaatgtagcgctgcaaaccacgattaagcgtcggcgtcatcgacatcaacgatgccttatgcccggcacgttttggcagacaaccatatttatgcagtgcatccagcagcccttgcttcgccagttcgcgatcctgatacagaccgcgcagtaccacttcatccggatacagccccagggttttgcccagcgttagatccccgctctcccagtagccgcgtagcgtaggcaggtcatgtgtcgccgcaaccgccatcgactgctccggatacgctttcggtgcacggaacgtcttctcgtggtcgttttcgaaatagagcactttgtaggagtacacaccgctgctgcgcagcttaccgacaatctctaccggtacggtaccgagatcttcaccaatcaccatacagcgatgacgtttactttcgagtgccagaatcgagagcagatcatccaccggatagtgaacatacgcgccctgatctgccgtctcgccatacggtatccaccacaaacgcagcatcgacatcacatggtcaattcgtaatgcgccgcagttttgcatattggcacgcaacagctcgataaacggttcataagcacgcgcggtgatgatatgcgggtccattggcggcaatccccagttctgccccaacgggccgaggatatccggcggcgcgccaaccgacgctttcaggcaatacagttcacggtcgcaccaggtttccgccccaccttccgctacgccaaccgccagatcacgatacaagccaatcggcatttcatagccctggcttatctcccagcaggcggcaaactggctgtaagcctgccactgcaaccagagataaaaatcaacgtcatcgcgatgttcttcgcagaactgacgcacttctggtgaatccacgttctgatacatctctggccatgcaggccagccccagcgcatttcgtcctctttcacttgctgggcatgtagcgcatcaaaggctgcctgccagaacaggctgtcgccttgatctgcaacaaactggcgaaacgcggccatctgctcatcatcacgttgcgcgaaacctttccacgccattcgtaatgctgtcatttttagggcggtaaccgtggagtaatcgacccagtcggcatcccgcgcctgttgcagcgtctgttgcgtggtcggcaactgccaccaggcctgagcctcttcgctaagatggaaatcttcgacggcgttaacgtcgatataaatcacattcagccagcggcgagaagacgggctatacgggctggcgctctccggatttgccggatagagcgcatgaatcgggttcagaccaatgaacgatccgccacgttttgccacatccactagcatcgctttgagatcgccaaaatccccaataccccagtttttttccgatcgcagcgtataaagctggacgcaggcaccccacagcttttgtttattcagcaacgcctgcggttcgtaacagcgtttcggggcgacaatcaccctgcaatgcgcgcgctggtcttcctgggtaagcgtcagcgtgtgataaccttccggcagcttcgtcggtagattgaacgctttgccccccgttatatggcctttgtactgcgttccttcttcggtggtcagcagccagctatattcgccgctgccctccaccaccatcggcatttttttgccgctggtataaaccatgacattcgggactggcgttaccgccactttcgtggcggtacgttgatgcatcgcgtcaagcanacgccgtttggtttcggcgctaatcgactgcggtttaccgtgggcattgatgtaattagggctaatccccgccgccagcgcggcattatccagacgtttgctttccatcgagcttccttagcgttttgcctgccagatacgagcctgataatcgcgaatagagcgatccgagctaaacataccgcagcgggcggtattgaggatcgccgcgcgagtccaggcctcctggtcgcggtacagcacatccacctgcttttgtgcctctacataggctgcgaaatccgccatcaccagatacggatcgccgccctgtttgccgatactgtgcagcatctggtcgaaggcatgcttatcgccgtcgctgtatttaccgctttccagctctttcaatactgcgtccagcaccttatctttcttccgccatttcaccgggtcgtagcctttggccagaattgccttcacttgttccacggtatgaccaaaaataaagatattttcttcaccgactttctcggcgatttcaacgttcgccccatccagcgtaccgacagtaagcgcaccattgagcgccagtttcatattgccggtaccggaagcttctttacctgcagtcgaaatttgttcggagatatccgccgccgggatcagtttttccgccgccgaaacgcaataatccggcaggaacaccaccttcaacttatcgccaaccagcggatcgttgttgatcacgtcagccactttgttgatcgcaaagataatatttttcgccaggtagtagcccggtgccgctttcgcgccgaagaggaagacgcgcggtacgcgatcagcctgcgggttttcacgaatttctttgtacaacgccagaatatgcagcagattcaggtgctggcgtttgtactcatgcagacgtttgatctgaatatcgaaaatcgcctgtggattgatctcaataccggtacgaactttcacaaactccgccagacggactttattcgcctgcttgatctcgcgatattgctgacggaatttcgcatcatcagcgaatttttccagattgatcagctgatcgagatcgttagcccactcttttttcagtgatttatccaacagagccgccagtgccgggttgcactgtttgatccagcgacgtggggtaataccgttggtgacgttatggaatttgttcggccatagctggtgatattccgggaacagatctttcaccaccagatccgagtgcagcgccgcaacaccgttcaccgcgaaaccgccaaccacacacaggttcgccatatgcacttgtttgtcgtgcaccaccgccagtttagcccacactttttcatcgcccggccaggttttctccaccagcgttttaaagcgagtattaatttcgttaataatctgcatgtggcgcggcagtaagcctttcaccagtttcacatcccagcgttccagcgcttctggcatcagggtatggttggtgtaagcgaaagttttgctggtaatggcccaggcgtcatcccagctcatctggtgctcatcgatcagcacgcgcaacagttctggaatcgcgatagttgggtgggtatcgttcagctgaataacttcgtaatccgccagttcgtgcagtttacgccccgccagatgatggcgacgcaaaatatccgctaccgaacaggcacactggaagtactgctgcatcaagcgcagctttttaccggcagtatggttgtcgtttggatagagaactttggtcagtttttccgcattgatgccctgctgttcggcacgcaggaaatcaccgtcgttaaatttagtcagatcaaacggatgcgcgtgcgtcgcctgccacagacgcagcggctgcgccacgccattacgatagccgacaacggggagatcccacgcttgaccggtaatggtaaactccggctcccagcgtccgtctttcgtcactttaccgccaatccctacctgcacatccagtgcttcgttgtggcggaaccacgggtagttactgcgatgccagtcatccggcgcttcaacctgtttgccatccacaaaagactggcggaacaaaccatattgatagttcagaccgtaacccgtcgcagactgaccgacagttgccattgaatcgaggaagcacgccgccagacgtcccagaccaccgttacccagcgcagggtcgatctcttcttccagcaggtcagtcagattgatgtcataagccttcaacgaatcctgtacatcctgataccagccgagattcaacaggttgttgcccgtcagacgaccaatcaaaaactccattgagatgtagttaacatgtcgctgattcgccaccggcttggcgaatggctgagcacgcagcatttcggccagtgcttcactcactgccagccaccactggcgaggagtcatttcagccgcagaatttaagccataacgctgccactgacgtgaaagcgcttcctgaaattgcttatcgttaaaaataggttgtgacataggagttccacttttcttagattttcaacacaacgttatcgctagtttgccaggctcgatgttgaccttcctcatcctgcgggggattaggcagggaggagttgcggggatgagcaaggaaatgtgatctcgaccacttaaagctagtgcaaaccacaggattagcagcaaatcaatgccatacagcgcagaaaatctgtatctaagtgcaaaaaatggccgttgcgtattttcaaaaagcgaaaggtaactctataaattaagtaaaggagtgaaacagtttcacaagtaaaatatccagtgtgctccatctcattcttaatagatttattaagatcatctttttagatagcactttcatcaggaatgaagaagaaacccttgcttaaatgaatctgatgaacataagggaaaccagtattcacgctggatcagcgtcgttttaggtgagttgttaataaagatttggaattgtgacacagtgcaaattcagacacataaaaaaacgtcatcgcttgcattagaaaggtttctggccgaccttataaccattaattacgaagcgcaaaaaaaataatatttcctcattttccacagtgaagtgattaactatgctgattccgtcaaaattaagtcgtccggttcgactcgaccataccgtggttcgtgagcgcctgctggctaaactttccggcgcgaacaacttccggctggcgctgatcacaagtcctgcgggctacggtaagaccacgctcatttcccagtgggcggcaggcaaaaacgatatcggctggtactcgctggacgaaggtgataaccagcaagagcgtttcgccagctatctcattgccgccgtgcaacaggcaaccaacggtcactgtgcgatatgtgagacgatggcgcaaaaacggcaatatgccagcctgacgtcactcttcgcccagcttttcattgagctggcggaatggcatagcccactttatctggtcatcgatgactatcatctgatcactaatccagtgatccacgagtcaatgcgcttctttattcgccatcaaccagaaaatctcaccctggtggtgttgtcacgtaaccttccgcaactgggcattgccaatctgcgtgttcgtgatcaactgctggaaattggcagtcagcaactggcatttacccatcaggaagcgaagcagttttttgattgccgtctgtcatcgccgattgaagccgcagaaagcagtcggatttgcgatgacgtttccggttgggcgacggcactacagctaatcgccctctccgcccggcagaatacccactcagcccataagtcggcacgccgcctggcgggaatcaatgccagccatctttcggattatctggtcgatgaggttttggataacgtcgatctcgcaacgcgccattttctgttgaaaagcgccattttgcgctcaatgaacgatgcactcatcacccgtgtgaccggcgaagaaaacgggcaaatgcgcctcgaagagattgagcgtcaggggctgtttttacagcggatggatgataccggcgagtggttctgctatcacccgctgtttggtaacttcctgcgccagcgctgccagtgggaactggcggcggagctgccggaaatccaccgtgccgccgcagaaagctggatggcccagggattccccagcgaagcgattcatcatgcgctggcggcaggcgatgcgctgatgctgcgcgatattctgcttaatcacgcctggagtttgttcaaccatagcgaactgtcgctgctggaagagtcgcttaaggccctgccgtgggacagtttgctggaaaatccgcagttggtgttattgcaggcgtggctgatgcaaagccaacatcgctacggcgaagttaacaccntgctggcccgtgctgaacatgaaatcaaggacatcagagaaggcaccatgcacgcagaatttaacgctctgcgcgcccaggtggcgattaacgatggtaatccggatgaagcggaacggntggcaaaactggcactggaagagctaccgccgggctggttctatagccgcattgtggcaacctcggtgctgggtgaagtgctgcactgcaaaggcgaattgacccgctcactggcgctaatgcagcaaaccgaacagatggcacgccagcacgacgtctggcactacgccttatggagtttaattcagcaaagtgaaattctgtttgcccaagggttcctgcaaaccgcgtgggaaacgcaggaaaaagcgttccagctgatcaacgagcagcatctggaacagttgccgatgcatgagtttctggtgcgcatccgagcacaactgttatgggcctgggcacggctggatgaagccgaagcgtcggcgcgtagcgggattgaagtcttatcgtcttatcagccacagcaacagcttcagtgcctggcaatgttgattcaatgctcgctggcccgtggtgatttagataacgcccgtagccagctgaaccgtctggaaaacctgctggggaatggcaaatatcacagcgactggatctctaacgccaacaaagtccgggtgatttactggcaaatgaccggcgataaagccgccgctgccaactggttgcgtcatacggctaaaccggagtttgcgaacaaccacttcctgcaaggtcaatggcgcaacattgcccgcgcacaaatcttgctgggcgagtttgaacctgcggaaattgtcctcgaagaactcaatgaaaatgcccgcagtctgcggttgatgagcgatctcaaccgtaacctgttgctgctaaatcaactgtactggcaggccggacgtaaaagtgacgcccagcgcgtgttgctggacgcattaaaactggcgaatcgcaccggatttatcagtcattttgtcatcgaaggcgaagcgatggcgcaacaactgcgccagctgattcaactcaatacgctgccggaactggaacagcatcgcgcacagcgtattctacgagaaatcaatcaacatcatcggcataaattcgcccatttcgatgagaatttcgttgaacgtctgctaaatcatccggaagtgccagaactgatccgcaccagcccgttgacccaacgtgaatggcaggtcctggggctgatttactccggttacagcaacgaacaaatagcgggtgaactggaagtggcggcaaccaccatcaagacgcatatccgcaatctgtaccaaaaactcggcgtcgcccaccgtcaggctgccgtgcagcacgcgcagaaactgctgaagatgatgggttatggggtgtgagtttgtatagcgtttttatgtacactctttatactgtatataaaatcgcactacaggctcatgaatatgaaaccggaaagcaaagaagcgccaatcaatatcagagcgaaagcctcacagcgtgacctgattgatatggcagcgaatctggtcgcaaaatcgcgcactgattttatgctggatgccgcatgccgtgaagcgcaagacatcttattagatcaacgactattcatccttgatgacgagcaatacgatgcgtttctcgctgccctggacgcccccatcactgctgagcgtcaggccaaaattaacgcgttgatgaatcgtaaatcgccatgggaataacggctcctactcccctaacgtctgaacataatctggctgacttttgctgttccgatcacgggatgaatgaatggctaaaaaagaaagcgttaaaaaatcacagctccggtctgtctcgtgtttacgttatctgtattgccaatacccgccaggtaatcggctattactgcctttctacaggcagtattcaacgtaatttggcccctggagccatgcgacgtaatgctcccgaatcgttgcctgttgtcgtattaggcagactggcaattgatcaagcctgggcaggtaaagggttgggcgtcgcattgttgaaagatgcagtctatcgcacaatgtccatagctcaacaggtaggggttcgtgcgctcattgttcatgccttagacgattcagtacgcaatttctatctgaagtatgcctttgtaccttcaccattccagtcacttaccttactgtatcccattactctggagtaatttacctctaccggatagtcacactgatgagtctgatccggganggatttcaatcagtgagtttggttatcatcacccgcgttacgccatctgtttcagccagagtaaaccgcaccggcaagaaacgctccaccacggcgatattggtcagcagatggcatgagggatgggcgaccgtaaattgtcccgcgcccgccagcgccattggcaacactagctggtcagcaagatattcccccactgccgccgggcttgccaggtagcgtttcacctctttcaccaactgtgccgcaaccacctcggcactgacgcgcttttcaccgacgacaaaaaagcgttcggtgatattttcactttcgacttcaagcgagacggtattacccggcccctggtcgcgcggcaggttatgaatattctgctcatgcagggaaaaacttgccgccagcgtagcgatttcacgctcagcgacatgccgcggcacgccagctaataacacctctccacgcatctgcacaatgttcccgcgctcgccaagttgcaaggtgttaaacgatgccaccggcgagacttccgttgccaccacgccgcctccggcaggataaaaaccgtgacgtaacagcgtggtttgctgatgaattcctattttcgccagcagcggctccaacacccggcggataaaatccgcaggcggggccgacgggttatcggtaccgccgctcacttcaacacgcgaaggtccatcggcaaaccacagcgcgggcagcaccgtttgcagcaccagcgtacaacttcctgcgctaccgatagcaaagcggtaatcgccgccacgcacggtgccgggccggaagaccagacgctgcgaccccagctccgcgccttccaccgtcgccccgcaaatttccgtcgccgcctttaccgccgtcagatgctggcgcaacagtcccggttttgcccgcccggcacgaatgccggtgatggtaaatggctggccggttatcatcgacagactcagcgccgagcgcatgatctgcccgccgccttcgccctgtgcgccatccagcgcaatcatccttttcatcatttatccttttacgcacaccacctgacgtagggtgtagataacttccaccagatcgctttgtgccgccatcaccgcatcaatatctttatacgccatcgggatttcgtcgatcacttcggcatctttacggcattccacatgcgcggtggcacgaatttgatcttccacgctgaacatttttttcgctttagtacggctcataacccgcccggcaccgtggctgcacgaacagaacgactcttcatttcccagcccacggacgataaagcttttcgctcccatcgaccctggaataattccatattgaccagcacgcgcagacaccgcgcctttacgcgtcacgtagatctcttcaccaaagtgctgttctttttgcacatagttgttgtgacagttgatctcttccatcgccagcgtttgtggctgtctgaccgttttctgcgtaatgctctgcaacgccgttactacgttttccatcatcacatcgcggttaaggctggcaaaaagctgcgcccaggccacggctttcaggtaatcatcaaagtattccgtaccttccataaagtacgccagatcacgcgacggcaatgtttcaagcgtttcctgcatctctttttgcgccagatcgataaagtaagtcccgatggcattaccaattccgcgtgaaccggagtgcagcataatccacacctggtccgactcatcaaggcagatttcaataaagtggttacccgttcccagcgttcccaggtgtttatagttgttagtgttaaggaaacgcggatatttttgcgttaaccactgataaccggcctccagctcagcccatttcgcatcgacgttaacaggcgggttttcccatgcgcctttatcacgtttacaacggccagtggtacgcccgtgcggcaccgcagtttcaatcgcctgacgcagctccgccaggttttccggcaggtcagccgccgttaaagcggtacgtagtgcgttcattccacagccaatatccacgcccaccgccgccggaataatcgcccctttggtcgggatcacgctaccaatggtggaacctttacccaggtgtacatcaggcattaccgcaatatgtttgaaaataaacggcatcttcgccgtattaataagttgctgacgcgcatcggcttctaccggcacgcctttggtccacatttttaccggggcattttcagtggtcagtaattcgtaattcattttgtttttctcttttcgttgtttgcggtcctgataattgcaaccgtcgtgccagaaaattaaataagcagattaattttttaattcattgttttaaaaagattatatctttacgtccgtaaacggagatttcccgcaaagccaatttaccgataatgaaatatcgtcttttataaggatatctaagatgcgtaaaacagtggcttttggctttgtcngaacagtgctggattatgccgggcgcggcagtcagcgctggtcgaaatggcgtccgtcactctgtatatgccagcaagaatcgttagtcatcgatcgactggaattattgcatgacgcccgctcgcgctcgctatttgaaacgcttaaacgcgatatcgccagcgtttcgccagaaaccgaagtggtgagcgttgagattgaactgcataacccgtgggatttcgaagaggtttacgcctgcctgcatgatttcgcccgtggttacgagtttcagccagaaaaagaagactatttaattcacatcaccaccggcacccacgtcgcgcagatttgctggtttctgctggctgaagcgcgttacctgcccgcccggttgatacaatcttcacctccgcncaaaaaagaacagccgcgcggcgcaggtgaagtgacgattatcgatctcgatttaagcctttataacgccatcgccagccgctttgccgaggaacgccagcaaacgcttgattttcttaagtccggtattgccacgcgtaacccccacttcaaccgcatgattgagcagattgaaaaagtggcgattaaatcccgcgcaccgatcctgctaaacggcccaaccggtgcgggcaagtcatttctggcgcgacgtatatttgaattaaaacaggcgcggcatcagtttagcggcgcgtttgtggaagtgaactgcgcaaccctgcgcggcgataccgccatgtcgacgctgtttggtcatgtgaaaggcgcgtttaccggggcacgggaatctcgtgaaggattattacgcagcgccaacggcggaatgttgtttcttgatgagattggcgaactgggcgcagacgaacaggcaatgctgctgaaagccattgaagaaaaaaccttttatccgtttggcagcgatcgccaggtgagcagtgattttcagcttatcgccggaacggtgcgtgatttgcgccagctggttgccgatggcaaattccgcgaagatctatacgcgcggatcaatntctggaccttcaccctgccggggctacgccagcgtcaggaagatattgaacctaacctggattatgaagtggagcgccacgcttcactcaccggcgacagcgtgcgttttaacaccgaagcgcggcgcgcctggctggcctttgcgacatctccccaggcaacatggcgcggtaactttcgcgagctttctgccagcgtcacgcgaatggcaacctttgcctctagcggacgcattactctggacgtggttgaagatgagataaaccgtctgcgctataactggcaggagagccgcccctccgcgcttacggcgttgctgggcgcagaggcagaaaacatcgatctcttcgaccgtatgcaactggaacacgttatcgcaatctgccgccaggcaaagtcgctttccgcagccggacgccagctttttgacgtttcgcgccagggcaaagccagcgtcaatgacgcggatcggctacgcaaatacctggcgcgttttggtctgacgtgggaagccgtgcaggatcagcacagctccagttgaatatggtggtccgtcagcacctgcatcacgcttactggcggcggggtgtcggtgtagacggcatctaccatgctgatgctacccatattgaccatcgcgttacggccaaatttcgagtgatcgacaaccagcataacgtggcgcgagttctcaataatggcgcgtttggtgcgaacttcgtggtaatcgaactccagcagcgagccgtcgctatcgatgccgcttatccccagaatgccgaaatcaaggcggaactgggagataaaatcgagcgtcgcttcgccaatgatcccgccatcgcggctgcgtaattcgccaccggcgagaataatacggaaatcctcttttaccatcagcgtgttagcaacgttaagattgttggtgacaatgcgcaaattgctgtgattgagcagcgcgtgcgccaccgcttccggcgtggtgccgatatcgataaacagcgtcgagccattggggatttgctccgccactttgcgggcgatgcgctctttttcttcggtctgggtggctttacgatcgtgccacggcgtgttaaccgaactggaaggcagcgccgcaccgccatgatggcgcaggatcaggttttgctccgccagctcattgaggtcgcggcgaatagtctgcgggctgacggagaagtgctccaccagctcctcggtactgacataaccctgctgtttaaccagttcgataataccgttgtgacgttgtgtttgtttcatttctaaatccctggaattattttcgttttcgcgcattgagcgaatcaacaaaagccatcgctaaacccacggctaacccggcgatgtgtgctccgttcgccatcgacatcccaaacaaatcaaaccatccggcgacaatccagatcagcgcaaagataattaacccacgttgcaggtaaatgccactttgcggatcgcgttcgccacgtagccagacgtagcccatcagcgcatacaccacgccagaaagcccgccaaaccacggcccgctgaatttttgctgcacatagccgcttaacagggcgctgataagcgtaatgacaattagcttaccgctaccgaggcgtttttccaccgcaccgccgagataccaccaccagagcaggttaaagaggatatgcatcagcgagaagtgcattaacgcgtgggtgaagtaacgccagaactcaaatttcagtgctggatcgaatggccaagccagccataacatcacttcctgatcgccgagaatttgcatggcaataaacaccaccacgcaggcgatcatcatcacccaggtcaccggacctgcgcgttcacgcaaggcggcaaagaaaggataacggcgataatgcaggccactgccggtatggcctgcctgccagctcgccgccagataacgcggatctgccgggttttcgagaaaacgcgccagctccgcccgtacgcgctcggcctgggactcatccgccagccagacatcgctttggttatgttgttgaatcgtgaggataacaccctgcgtcgccatgtaatcaacaaacgcctgcgccacgcgggggttagcaaaagaggtaatcatcaacatcgttgctgtcgcttattccacacaaaaggggacagtataaagcgttacgcgccgtacgccacctntgcgggaaactgacgttgccaggcttcaaagccgccgtcaatgctatagaccacatcgtagccctgttgcagcagatactgcgccgcgcctttgctgctattgccgtgataacacatcaccatcaccggagtgtcaaagtcgttattacgcataaaagcgcccagcgtgtcgttggttaaatggaaagcctgcaccgcatgtcccattgcgaaactctgtggatcgcgaatatcgaccagcaccgcctntttttcctgcaanttntggtgcgcgtcggcaacgttaatacattcgaactgatccatgcgtctctctttctttacaaacaagtgggcaaatttaccgcacagtttacgtcgaagcggcagataaacgccataatgttatacatatcactctaaaatgttttttcaatgttacctaaagcgcgattctttgctaatatgttcgataacgaacatttatgaactttaacgaaagtgaatgagggcagcatggaaaccaaagatctgattgtgataggtggcggcatcaatggtgctggtatcgcggcagacgccgctggacgcggtttatccgtgctgatgctggaggcgcaggatctcgcttgcgcgacctcttccgccagttcaaaactcattcacggtggcctgcgctaccttgagcactatgaattccgcctggtcagcgaggcgctggctgaacgtgaagtgctgctgaaaatggccccgcatatcgccttcccgatgcgttttcgcctgccacatcgtccgcatctgcgcccggcgtggatgattcgcattggtctgtttatgtacgatcatctgggtaaacgcaccagcctgccgggatcaactggtttgcgttttggcgcaaattcagtgttaaaaccggaaattaagcgtggattcgaatattccgactgttgggtagacgatgcccgtctggtgctcgccaacgcccagatggtggtgcgtaaaggcggcgaagtgcttactcgtactcgtgctacttctgctcgtcgcgaaaacggcctgtggattgtggaagcggaagatatcgataccggcaaaaaatatagctggcaagcgcgcggcctggttaacgccaccggcccgtgggtgaaacagttcttcgacgacgggatgcatctgccttcgccttatggcattcgcctgatcaaaggcagccatattgtggtgccgcgcgtgcatacccaaaagcaggcctacattctgcaaaacgaagataaacgtattgtgttcgtgatcccgtggatggacgagttttccatcatcggcaccaccgatgtggaatacaaaggcgatccgaaagcagtgaagattgaagagagtgaaatcaattacctgctgaaagtgtataacgcgcactttaaaaaacagcttagccgtgacgatatcgtctggacctactccggtgtgcgtccgctgtgtgatgatgagtccgactcgccgcaggctattacccgtgattacacccttgatattcatgatgaaaatggcaaagcaccgctgctgtcggtattcggcggtaagctgaccacctaccgaaaactggcggaacatgcgctggaaaaactaacgccgtattatcagggtattggcccggcatggacgaaaganancgtgctaccgggtggcgccatcgagggcgaccgcgacgattatgccgctcgcttacgccgccgttatccgttcctgaccgaatcgctggcacgtcattacgcgcgtacttatggcagcaacagcgagctgctgctcggcaatgcgggagcggtaagcgatcttggggaagatttcggtcatgagttctacgaaacggagctgaaatatctggtcgaccacgagtgggtccgccgcgccgacgatgccctgtggcgtcgcacaaaacaaggcatgtggctgaatgcggatcaacaatctcgtgtgagtcagtggctggtggaatatacgcagcagaagttgtcgctggcgtcgtaaattaacgtaaggtgatcaggtcagatttcaatctggcctgagactgatgacaaacacaaaattgcctgatgcgctacgcttatcaggcctacgtggtttatgcaatatgttgaatttgcatgattttgtaggcctgataaggcgttcacgccgcatcaggcatgaacaaagcgccacgttgtcaacaatctgacctactttttgattcagggaattaccgcaaagcccacgccatcatacccaacgtaacaaaacttaagcacgttccccactcactccacttccgtatctggcttctatttttgctacgccactggcaataatatcccaacgcaaaaccaagctgtgcacttatcggaccgacaaagtcgatccactgttgagaccaaaatggcgaaacattcagtgggagccagacaactgtcagaaagaaactgcgcatattttccagcaaagcaatttgcgctggcgcgacataaaaaatgatattccacaggagcaaccagaaataaactggtgcaaataccagccaacaatgcagtctgcttttcaattcaggtggcgttctgcgcgcaaattgccaaccaacgcccaccattgcacagaagaaaagcgcatattcagccgataaccatagttgtaattgcagaagggaaatacgcctgtgcatgagcgggattgagaacagtatttctcccagaaaactcagcgtgattacacaggcagccagcgcaaccaccgtcggccacaccaacaacggtacaataacaaagccgagaaataacggataaatataaagtctgattatattcatcattattgtcctgatgattcgggggatgcttcatacagcggcacataccccacatcctctaccaactgttgcccctgctgacttataaaccagtcaacaaatttctgcgtttccggcgtgggattttcacgcgtcaccatataggcatccacaatgtatggataagtgccgttgcggatattttcctcggtaggcgcaacgccatttatagccaaaagtttaatctgcttgcgcattttgagcatattgtcattcatacgagtgacgtaatagtggaaggtgtacccaatggaagatggcgtgttttgatagtcggcaacttcagtaattaaaccgcccataagatcaatcacagtggattttttagctggcagcattggggtgtcttgcataaccaaccccttcataatcgtttggcttccagaatcttcagggcgctgccagacttttatatgttcgtcactaccacctactttattccagcggctagt

SEQ ID NO: 1530 - DNA, 15233 bp, Escherichia coli
  Strain O55:H7
  modified_base (9)..(9): a, c, g or t
  modified_base (2683)..(2683): a, c, g or t
  modified_base (2850)..(2850): a, c, g or t
  modified_base (7147)..(7147): a, c, g or t
  modified_base (8355)..(8355): a, c, g or t
  modified_base (8623)..(8623): a, c, g or t
  modified_base (8644)..(8644): a, c, g or t
gctaaaaanatctttaacctggtgctcagagagagaatttaccgggttattaatatcaacgataaagacaaaggcttcgcgggcgaaagcggtatatttcagtttaacacccgcttcttctgcacgttttttctgtccttccgacggttgtgcaacaaaaataaccgtcgcggaacctttaatcagactatcgtaggcttcagctgttcgggtttgctgcaaaccatacgcctgccaggccagcgaggttcgatccttatcttttggctcgggtactaatttataatacgcggaggcatacagcgggtataaggctgtagcgccgtacactctcggccatcttgaccaatcatcgctgtaacgtaatgcaggttgcccccgcagagacgtcagtccatggctctcttcttccctgacgctgttatagtacccttcccggtcgacacatcccgccagtaacgccgtgcctaatagtaaaacaccggtgaatttattcatctcgctgattcctttctctcgagcgttattccattgttagatacagcggcacatatcccacatcttctaccagactctgcccctgcggcgttaaaaaccattcgaccagtttttgtgtttctgacgttgtattttctctcgtcaccataaatgcatcgacgatgtacgcatatttgccgttgcgaatgttttccgccgtcggtgtaataccgttaatcgctagcaatcttatatttttatcagcattcatttgcgtcgcgtaatagcggaaggtatagcctattgcgttgtttgtattacggtattcggcaacgactttaatcattccctccatcacgcttgccacttccgtttcctgcggcgagatcatgcggacttttttcatgacctgtgattgcatcactgtctggctgccagagtcttccgggcgctgccaggtctggatctcctgatcgttaccgccaacagtacgccaattggtaattgcaccactgaaaatgtcacgcacctgttgttcagtcagggaattaaccggattatccgcattgacgatgaaaacaaatgcttcacgggcaaatggcgtgtatagcaaagtgacgcccgattcctcagcgcgttttttctgcccgccggagggttgcgccacaaaaataatatcggcatcacttttaacaatccggttatatgcatcgggggtacgagagttctccagatattcccaaacgtgaaaatcctctggtattacacttaatgcataaaatgcagaagcataaattgggtacgcagccgtggcgccatcgattcgcggccagttttgcctaaactgaatttgcggtttgccacgcagcggcgtcagtcgattattgagtttatcaggtcgccaggccctgatatcaatattttcgcgtacaccgacaccaggattttgctgcttatataaatgggcctgatacccggcgacaataccaagtaagagaagtagaaacaggagtaagttacggcaacgtagtccggacgtgccggataaaggatatctggtcggccaggcgtatcccagcgaaaaactgatatgcgccccaacgggaataatgaccatccaccagtactcaccacccactaatgagactaaaaaaacgcccaaccagggaagcataaggtttgccaaccaaccagctcccatctggcgaaattgataatctgccagatgtagcgtgattatccagccaaccagggttaatagcgcgggtaagagaaaaaagcattgccgccagacggctatttctctgttttctggcgcgctatcaccggcccacacgcgaccagagaaaaatattattatcgcccccagcgtcagcataaagacgttgagtagaagataaattgttggcgtgataaggatattacaaacttcaataataccggtaagcccgacacccagcatggcaacaaccgctgccaaaaattgcgccagtatggggatgccgaaaaaagtcattatcagcgaggtcaaaatccattttctatttggcatcattctgtccattcttcctgaatgacggaattatactccccgagaaccctcgccccctctggacacttttccgaaataaaggcgaaaaaaacgggaccttgtggccccgttctgttttttagcgaacttacaatctcaccggatcgatatgccagatatgatcagcgtactctttgatagtacggtcagaagagaagtagcccatattggcaatgttcagcatcgcttttgcggtccactcttcctgaagctcgtagagttcatcgactttatcctgacaatcgacatagctgcgataatccgccagtacctggtagtgatcgccgaagttgatcagcgaatcaaccagatcgcgatagcgacccggatcttccggactgaatacaccgctgccgatttgcgtcagcacctgatgcagctcctcatctttctcgtagtattcacgcggtttgtagccctgacgacgcagttcttccacttcttccgctgtgttaccaaaaataaagatattgtcagcaccgacatgatccagcatctcgacattcgcaccgtccaacgtaccgatagtcagcgcaccgttaagcgcaaacttcatgttactagtgccggaagcttccgtccctgccagcgaaatctgttcagacagatctgccnccggaatgatcaactgcgccaggctaacgctgtagttcgggatgaacacgactttcagcttatcgccaatctgcggatcgttgttgatcactttcgctacgtcattgatcaaatggataatatgcttcgccatgtaataggccgaagccgccttaccgccaaaaatnttcacgcgcggtacccacttcgcatccgggtcggccttgatgcggttatagcgggtaatcacatgcaacacattcatcaattgacgtttgtattcgtgaatacgtttgatttgcacatcgaacaacgcctttggattcaccaccacattcagctgctgggcgatatactccgccagacgctttttattctccagcttcgcctgatgcacagcgtgattaaccattgggaaatcacagtgttgttgcagctcattaagcaggctaaggtcggtgcgccagttacggcccaggtgttcgtccagcacggctgaaagcgatgggttcgctaccgccagccagcgacgcggcgtcacaccgttggtgacgttggtgaaacgacccgggaagattttcgcaaagtcggcaaacaacgattgcaccatcagattagagtgcagttccgatacaccgttaactttgtggctcacaacaaccgccagccaggccatacgcacacgacgaccgttggattcatcaatgatcgacgcccgtcccagcagatcggtatcgttcggatactgttcctgcaaggttttcaggaaatagtcgttgatttcaaagatgatctgcaggtgacgcggcagaattttacccagcatatcaaccggccaggtttccagcgcctcgctcatcagcgtgtggttagtgtaggagaagacctgacaacacacctcaaacgcgtcgtcccagctaaattggtgctcatcgatcagcagacgcatcatctcaggaatcgacagtaccggatgggtatcattgagatgaatcgcgattttatccgccaggttatcgtaggttttatgcaactgataatggcggcttaaaatgtcctgaatggtcgaggaaaccaggaagtattcctgacgcaggcgcagctcacgcccggagtaggtggagtcatccggatacagtacgcgagatacgttctcggagtggtttttatcttccactgccgcgaagtagtcaccctggttgaatttaccgaggttaatttcgctactggcttgcgcactccacaaacgcagcgtgttggtcgcgtcggtgtcgtaaccagggattatctgatcgtaagcgactcccagaatctcttcggtttcaatccagcgcgtttttttaccttcctgctgaatgcgaccaccaaaacggactttatagcgcgtgttgtggcgtttgaattcccacgggttaccatattccagccagtagtcaggcgactctttctggctaccgttaacgatgttctgcttgaacataccgtagtcatagcggatgccgtaaccgcgccccggcaaccctaacgtcgccagagaatcgaggaagcaagccgccagacgtcccaggccaccgttaccgaggcccgggtcattttcttcatcaatcagctcttcgagatttaaccccatcgcttccagtgcgccctgtacatcttcgtaaattcctagcgacaacatggcgttggagagcgtacggccaatcaaaaactccatcgacaggtagtaaacctgacgagtttcttgcgacaactgggcacggtttgaacgtaaccagcgctccacgagacgatcgcgcacagcaaataacgttgcgttcagccattcatgtttattggcgacgaccgggtcctttccaatcgtaaacatcagcttgtaagcgatagagtgcttaagagcttctacgctaagcgtgggcgatgaatatgtaaacggagcattcatataggcgtttcctgaaaactatttcaagcgatagtaaagctcacggtacgacttcgccgcgacctgccagctaaaatccattgccatagcctgacgttgcacaaaccgccacagagaaggacgggaccacagtacaaaagcacgtcgaatagcccgtaacagcgaccaggcattactatcttcaaagacaaacccactggcgacgccatctgcaaggttctcaagagaacagtcagaaaccgtatcagcaagcccaccggtgcgccgcactaacggcagcgtaccgtacttcaatccataaagttgcgttaagccgcacggttcaaaacggctgggcaccagaatgacgtccgcaccgcccataatgcgatgcgaaaatgcttcgtgatagccaatctgaacgcccacctggccggggtattccgctgccgccgcaaggaaaccttcctgcagcaccggatcgcccgcgccgagtagcgccagctgcccgccctgctccagaagacccggtaaggcctccagcaccaggtcgaggcctttctggctggtcagacggctcaccactgcaaaaagcggcactttatcgtcaaccttaagccccattgcgatttgtaactggcgcttattttccgctttatcttccaacgtatcgcgggtgtaacgcgaggccaatagtaagtccgtctctggactccagattttctcgtccacgccgttcagtacgccggaaagacgcccttcacgatgacgctgttgcaacaaaccttccataccgtaggcaaactgcggttcggtgatctcgcgagcgtaggttggactgaccgccgtaatgtgatcggcatagtacagaccggccttcaggaaagagatttgtccgttgaattccagcccatgaatattaaagaatgaccatggcaattggatgtcattcatgtgatgtgcataaaacatgccttgataggccaggttgtgcacagtaaacaccgacttcgccggacgcccgcgcgccgccagatacgcaggcgcaaggcctgcatgccagtcgtgcgcatgcaccacatcaggacgccagaatgggtcaagcccgctggccatttctgccccaacccaccccagcagcgcaaaacgcaatacgttgtcggtataggcaaataagttggtatcgtgatacgggcttcccggacgatcatagagatgcggcgcgtcaatcaggtatatgccaaccccgttgtaatgaccgaacaacagcgtgatatgcccggcgaaggtatcacgacgggatactacctgcgcatcggtcacgccacggcgaatatcgggaaatgcaggcaacagtacgcgagcgtcaacgccgtctgcgatttgtgctgcgggtaatgccccaataacatcagccagaccgccggttttaagcagcgggaacatctctgaacatacatgtaaaacctgcattatcgctcctgtttatgccctaacttccgtagcatttcgcgcgttaccagcacgatgccttcttctgaacgatagaaacgacgtgcatcttcctctgcgttttcaccaatcaccatgccttccggaataacacaagcacgatcgatgacgcagcggcgcagacggcacgagcgacctacccatacttccggtaacaatacggcggaatcaatgttgcagaatgaattcacgcgaacgcgcgagaacagaacggactgcaccaccaccgaaccggagatcacacaaccgccggaaaccagtgagttaagggtcatcccgtggctaccggagcgatcctgcacgaatttcgctggcggtaatgattcattgtaggtgcgaattggccaattgcgatcgtacatatccagttccggcaccacagaggccagatcgaggttcgctttccagtaagcttccagcgtacccacatcgcgccagtacggctcggcatccggatcggattgtacgcaagagagcgggaacgggtgcgcataggccagaccggcttcggtgatcttgggaatcaaatctttgccaaagtcgtggctggagttctcatcgcgatcgtcttcttccagcagttcatacagatagtcggcgtcaaagacgtagatacccatactcgccagagatttgctcggatcgttcggcattgacggcgggttagcaggtttttcaacgaattcgataattttatcgttctcatcaaccgccataacgccaaatgcggaggcttcttcaatcggtactggcatacaagcaacggtgcaacgtgcgcctttttcgacgtgatcgataagcatacgcgagtagtcttgcttgtagatatggtcgcccgccaggatcaccacgtattccgctttataacggcgaataatatcgaggttttgggtgaccgcatctgcggtgccgcgataccagttttcccctttcattctctgctgtgctggcagcagatcgacaaactcgttcatttcttcattgaagaatgaccagccgcgctgaatgtgctgcaccagagtgtgggactggtactgggtgatcacgcccanacgacggatcccggagttgatgcagttagacagcgcaaagtcgataatgcggaacttaccgccgaagtgtacggccggttttgctcgcttattggttaaatccttcaggcgggtaccacgtcctcccgccagtatcagggcaacagatttcaatggcagctggcgcgccaacattaagtgatcgttcttctctaaactaaccatgactaactccttttttatcatctctggaacacacacaatccgtgtgcaggtccctgccagacagccgtaatcactgggttatcctctccagcgaatgggggaatggcgtgccactccccagcaggtaaaacaatctctgttacctcaagcgtggcgttaattgcgatcaaaaagcgatccgagagcagaatttgcagctgtttcggcccgttttgccactcatccgtgcttaaaggttgagcatatcgatttagccaacggacattgccgtcgccttcttcccaccagcgattctccaccaaagcgggaatacgcttgcgcagatggattaacgcggcggtaaatgcggttaaaccactgcttgcctgcgaccagtccaaccaggttaattggttatcctgacagtaggcattgttattgccatgctggctgtgaccatgttcgtcaccggccagtaacatcggcgtaccctgggagagcaacaacgttgttaacagggcgtgaatgctgtcgcgccgccgttcaaccaggtcaagggtaccgcctaccccttctttaccatgattgttactgtaattgttgttggtcccgtcgcgattttcttctccgtttgcttcattgtgtttatggttgaaacaaacgcagtcgcgaagcgtaaaaccgtcatgcgcggtgacgagattaatcgcggcactcggcagacgaccattacgtttaaaaacatcgctggaggcagcaaaacgcccggcaaacgcccccagaggcaaatcataatgtagccagaaacgacgggcagcatcgcggaaatgatcgttccactcggcaaacagcggcgggaaatttcccacctgataaccaccaggagcgatatcccacggttcagcaattaacttcacctgcgagagcaccgggcagttctggatagcggtaaacaacggcgcatcctgacggaactctggcgtacggcccatgactgccgccagatcaaagcggaaaccatcgangtggcaggtttctacccaataacgcaggcaggcgctggcataatccaccaccgccgggtgactcaaattgagcgtgttgccacaaccggtccagttgtgataatcgccgtcttctcttatccaataatagctacggttgtcgatcccacgcagcgagaataacgggccgtcgaggtccagttccgcactatggttgagcacgatatcaagaatgacttcgatacccgctttatgcagtgctttgattgcatcgcgaaactcatgcagngccgtttctggcgagcaggcntacgccggatgcagcgcaaacatcgccaccgggttgtaaccccagtagttacttagccccatgcgttgcagacgtggttcactggcaaactgcgccactggcagcagttccagcgcggtaatgcccaattgtttcaaatagttgatcatcaccggatgcccgagggctttataagtgccacggatctcgaccgggatctccgggtgcaggtacgttaatcctttaacatgggcttcataaatgatggtgctgccccacggcgtgcgcggcggggcatcatcttcccagtcatagtgatcaaccaccactacgcatttcggcgcaatggcggcgttgtcgcgatagtcaggttcattatgaccggcgtgcagcagcgggttatctttaaactccccgtcaatttgccgcgcgcaaggatcaatcaacaacttcgccgggttaaagcgatgcccctcggcgggttgccaggggccatgaacgcgataaccataacgcaaacccgggcgcgcatccggcagataaccgtgccaaatgtcgccactgtgccctggcaagtcatagcgatgttcctggccattggcgtcaaagacacacagttctacccgctcggcatgagcggagaaaagtgtgaagttgacgccctgaccgtcgtaatgcgcgccgaggggagcgggtttgccaatggcgagttgtgtcattctgcctcccgaaccagccagatagtggccagcggtggtagcgtcaggcttagtgaatgctgacgaccgtggctggcaatctcatcgctgtgtaccgtgccgccattacctgcattactgccgtgatagtgcatggaatcggtattgaggatctcacgccatttgcctggctgattaatgccgaagcgataatcatgacgcggcaccggcgtaaagttactggcaacgatgatttcgttaccctctttatcgcgacgcacaaagatcagcaccgagcgttctttgtcatccaccaccagccattcaaagccgtacgggtcaaaatccagttcatgcatcgctttatggtggcggtaggtgaggttcagatcgcgcaccagacgctggacaccgtggtgccagttatcgccgccttccaacagatgccagtcgaggctggcgtcatggttccactcgcggccctgggcaaattcgttccccatgaacagcagtttcttgcccggaaatgcccacatccagccatagtaagcgcgcaggttagcgaatttctgccatgcgtcgcccggcatgcggtcgagaatcgattttttaccgtggaccacttcatcatgcgacaacggcaggacgaagttttcagtgtagttgtagagcatcccgaaggtcagtttatcgtgatgatactgacgataaatcgggtcgagcttcatgtagtccagggtgtcatgcatccagccgaggttccacttgtaccagaagcccagaccgcccatatcctgcggacgagaaacgccagggaaatcggtagactcctcagccattgtcaccgcaccggaaacctgctcaccaagaatacggttggtattacgcaagaattcaatcgcttcaagattctcgcgcccgccaaattcgttcgggatccactccccctctttacggctgtagtcacgataaatcatcgacgccaccgcatcgacgcgcagcgcatcaataccaaaacgttcaatccagtaaagcgcgttaccgacgaggaagttactgacttcacggcgaccatagttgtaaatcagcgtgttccagtcctgatgatagccttcgcgcggatcgctgtgttcatacaagttcgtaccatcaaattcggcaagcgcaaagtcatcagtcgggaagtggcctggcacccagtcgagaatcacgttcagaccagctgcgtgtgcagcatcaatgaaataacggaagtcgtcgcgagtaccaaaacggcgggttggtgcatacaggccggttggctgataaccccaactgccatcgaagggatgctcgttaaggggcagtagttcgaggtgggtaaagcccatccatttagcataaggcaccagttgatcggccagctcgcggtagctcaaccagaaattgttgtcggtgtggcgacgccaggagcccaggtgaacttcataaatagagattggcgcatcaaactgattcgcttttttgcgctcttcagtctgtacaaccttttccggcagcccgcaaataagagacgcggtttccgggcgcatttgcgcttcgaaggcataagggtcggacttcagacgcaagttgccattggcatcaatcatctcgtatttatagagctgaccgttatgcgccccagggataaacagttcccagatgccgctctctttacgcaggcgcatcgggtgacggcgaccgtcccagtagttgaattgcccaaccaccgagacccgacgggcgtttggagcccagacagagaaacgcgtacctgtgacgccatccatagtatctgcatgcgcgcctaaagtttcatacgggcgcaggtgagtaccttcagataatagccaggcatccatttcctggattagcggaccaaaacggtaaggatcatcaatcaggttttgctgcccatgccagacaacagccaactgatagcggaaaaaattcttacgtcgcggaatgacgccactaaagaatccccgtgagtcgagacactccagttttgcgagtttgcgcccggttttcggttcaatcacccacacatcggtagcgtcgggtaaaagggcacggacttccagtcccgcggtggttttatgcattcccagtacggaaaaaggatccgcaaaatggcctgcaattagcgcgttaatcacgtctctatcgatacgatcggacatgcttgtcttcctgttttattgtgtcaccccatccaattggatttttgacttctggttgtgacatttttttgacctgaacggcgcagcactctgtgcatcctctctgcgtcgtcctcacttcaggtaaggctgtgaatactcatgtattcagccacccttaaagaatagccaatgctctatttaactcccggtaaatcatgaaacatctgcgcttactcctgtattacgcactaacaggggcggcatcgcgccccagatttaatgaataaagattacgccagttgacgaagcatccgacgcagcggctccgcggccccccacagcagctggtcgcccacggtaaaggctgacaggaactctggtcccatattcagcttacgcaggcggcctaccggcgtggtcagcgtgccggtaacggcagctggggttagctcacgcatagtgatttcccgatcgttcggaacgactttcgcccacggattgtgcgcagccagcagttcttccacggtcggaatcgacacatcttttttcaatttaatagtgaatgcctggctgtggcagcgcaatgccccgacacgcacacataaaccatctaccggaattacggaagatgtgttgaggatcttgttggtttccgcctgccctttccactcttcgcggctctgaccgttatcgagctgtttgtcgatccacggaatcaggctacccgccagcggcacgccaaagttatccaccggcagctcaccgctacgggttaaggttgtgactttgcgttcgatatcgagaatagcagaggacggggtcgcgagttcatctgctacatggccatacagatggcccatctgggttaataactcacgcatatgccgcgcaccaccgccggaagcggcctggtaggttgcaacggacacccaatcaacaagatcattggcgaataaaccacccaacgacatcaacatcaggcttacggtacagttaccgccaacaaaagtcctgatgccattatttaatccgtcggtaatgacgtcctgattgacggggtcaagaatgatgatggcgtcatctttcatgcgcagagacgatgctgcgtcaatccagtaaccctgccatccgctttcacgaagctttggatagatttcgttggtataatcgccgccctgacaggtcacaatgatatcgagggcctttagcgcctccagatcaaaggcatcctgaagtgtgccagtggttccgccaaaagacggcgcagcctgaccaagctgagaagtagaaaagaagacagggcgaatggcgtcgaagtcgcgctcttcaaccatgcgttgcatgagaacggagccgaccataccgcgccagccgataaaaccaacatttttcataagcgttttttcctgcaaagatgtgtgctgtataaatgtgccggtctcctcttggcacatctttcaccatacaaaaagcagccaaagtcgcaagtgaaattaatcaatgatagcgaagccatcagtaatgcgacttatcctgctttgttagcacgcagaaagtccgcggcaattatcagggaatttgagttatgaatgaaatcatttctgcagcagttttattgatcctgattatggatccgctcggaaacctacctattttcatgtccgtactgaaacatactgaaccgaaaagacggcgggcaatcatggtgcgagagttgcttattgctctcctggtgatgctggtgttcctgtttgcgggtgagaaaattctggcatttctcagcctgcgagcagaaaccgtctccatttctggcggcatcattctgtttctaattgccattaagatgattttccccagcgcttcaggaaatagcagcgggcttccggcaggtgaagagccatttatcgtgccgctggcaattccgctggtcgccgggccaactattctcgccacgctgatgttgttgtctcatcagtacccgaatcagatgggacatctggtgattgctctgctgctggcctggggcggcacctttgtcatcctgctacagtcttcgctatttttacgtctgctgggcgagaaaggggtgaacgcacttgaacgcctgatgggattgattctggtgatgatggcaacccagatgttcctcgacggcattcgaaggtggatgaaggggtaaggttcaaacaggtgctgcacacaaccagacgcggcacctgttttattacctgaactgataatgaccttcgcccaatcggataacccttccctcttcttctgcgcggttcagccacacactaatttgttcgatggttaaaccagtacaagacgccagcctttcaatacttatcgattcctttgcaaggatcgccagttccgccacaaagagttgataaaaatcgacaggcgtatacgcgggcattactgcgtaatttgcgtcatcttcatgcagcgaaaacagttctggttgagcgttacggagtgctctgtcatacatcagcccaggaacgtctggcagtctgatcgtcacattctcagcctgttcagcactccatgacgccccattttctactaatcgtgaattggctgattgcatatcctgatttggtttaacctgcacaggcagccactgatgttttaatgcctccatcgccccggttatcgttccaccggtcattcccgcacgtacaaccattgcgctttcagcaaggcaataaatatatttatttcgcgccatcgcattgccgacggtgaaacgtacctctgggtaaaacggcgaaatcaacaccaggttgcctgctataagcccttcacgccatttcactaacgtactcgtttttaacaagctatcagctaatacgccaacggcagttcccccggcctccagtgccgacgccattgcacattcatcaatacctcgcgcaccaccagagataacgcaaatcccctgttgggccagtttcgcggccagttgttgggtatagcgcaaatcgtcagtcggagcatctcgcgagccaacaatcgccataccttccgcttgcagtaatgctttattcccgcagccaaataaaacgggaggtgcatccgttcgcaatcggtttttcaagcgaacgggataatcagcatctccgcgggttaagatccataaaccggcgcgttgccacttatctaccgccaacgccagactatgaccacgcgccagcaagccaagaatacgctcctgagaaatacgcggatcgctccagcctgtaagtttctcttgcggttgcggcaccagaagctcggcgggactgatacgttggtgcttcagccataatgcaaacttcccccattcactattactaagaggtttatactcactcgccgccgcgcgagaaaaatcgctggttagcaggagagttgcttgtgcattggctgaaagattcatcaattttttaccgaggtagaagcaagggcaagaggataaaccgtcgggcaacctgcctggcgtaacagtgctgttagaactgtcagcgtccatgcagaatccacgatatcgtcaaccagcaacgccggaccaggcatcaaaggaggggtaatcacaaacgccccgtcgagattttgacactggtggaaacggttttgctgcattttctgcggtggattgtccacgactttttcaatggcatcaataaaaggtaagccaagtttcgccgccagtcgccgggcaaaatcaggaaccaggtc

SEQ ID NO: 1531 - DNA, 4832 bp, Escherichia coli
  Strain O55:H7
  modified_base (2829)..(2829): a, c, g or t
  modified_base (2992)..(2992): a, c, g or t
  modified_base (3959)..(3962): a, c, g or t
aatcaggaaccaggtcgaggtgctttaatgaaggaacgcagcatacccaggttggttcaggatgcggattccagcgttggcgaaccatttccgcacatgcctccaccagttcatcactgaatcgccccgtttttttctcctgtgctacctgctttccccacccggaatatccccaacgagaaaggattctccccgtagatccttgtaaactcgcaggcaagttccctttaaatccgtattgcgtaaaagccccagctgccacctgtttattgagatttaatgacaggtcagcgtgtttaataaataagtttgccgcatggagtaagccgctatcaatgtcgggcgacaacaacggatgctgaagacaactgctacatttaccacaatgttcggcacctggctcatcgagtgcgcggcgcagaaattgcattttgcactccttggtcgtgatatagctttcaacgtctgccagctcactttttctctgattcatcaaatggttaattcgttcatggtcaggagaaaaactgacaattgttctgcgccataatttctcggtatacaccacaggcgatggattttcagctaccaataatttcagtgctttttctatttgcccataacggagattcgtccgttgttcaatgcctcgtaaggtaagaccgtcattcacgctaagtacgttgagtatttcatgaatttgcgcctccgcaggaaaggcgctttcacggaagaatttatgaatagcacggtcttcactgccgcaaagcagtatgccaacagcagaatcgataccgcgaccggcacgccccacctgttagtagtaaccaactatcgaacctggcatctggtaatgaataacaaaccccaaatccggtttgtcaaagcccattcccagcgccgttgtcgcaaccagcactttaattttatttgccagcaacgcctgctccagatattccctggcagtattagaatcttccgcgccttcacaagtcacgccgctgtagtaagcaaatgcactgataccatttttccttaaccactcggcgacaagttcggcatcgcgagtagtcagggtataaacaattcccgatttggaaaactgagggataaccgttgctaaccatgccagacgggatgactgttcacctaagactaaggcatcaagcgccaaactttcgcgagccagcgttccacgctgaatcacaatgtcacccaattgctgacggatatcctcaacgacacggttattcgctgtcgcggttgtacccagaacaggggtattcgcaggtagttgcgcaaaatatctaatatacgtcggtaatccgggcgaaaatcgtggccccaatcagagatgcagtgcgcctcgtcgaccacaagcaagccaatatgatcggctataggatataaaaccgtttcgataaagtcctggtttgccaaacgttccggggaaaccagcaagcaatcgacctcaccttgcagcaacttatcgctaatgcgctgccattcttctctgtttgtagaattcaacgtttcagccgtaatacctaaccgttcagcggcggcaacctggttacgcatcagggcaagcaaaggagagatgataattgtcgggccagcgccgcgatcgcggaagattttactggcgatgaagtacacagcacttttcccccagccagtgcgttggacaaccagcagttttcgccgttggttcaccaccgcgtctatggcttcccattgcccttccctgaaagtagcggtggtatttcctaacatccgctgtaaaagcaattcagctgcgtgcttttccatctttatctcctgcgatctttaggcagtgattagaacggattatttgcaggtaaatttgcgagagagatcaaaaagatgaagagaggagaaaagagaaatgaattactgcgagcaagctcgcagtaatttgtcgcagtaattaactcaacagctggaacgcaatcatcccaacgatggcaccgacagtgccgaggatggtttccatcatggtccaggttttcagcgtttcggcttcggtcgcgccggtaaatttaccgaacaaccagaaaccagcgtcgttaacgtggctgacaacaatcgaaccaccggcgatacaaatcgacagcgccgccatttgcgcaccggagtagttcagttgttcaataaccggcatcaccagtcccaccgccgttaaacaggcaacggttgcagaaccctgaatgatgcgcactgcagcggccagcacgaagcaggtgatggcaatcggcaggcccatgccggttaacgcttcgcccagtgccggacctacgccagagtcaaccagcacctgtttgaacacgccgcccgcaccaatcaccagcagaatgatccccgccggttgcagcgcgtgaccgcaaatctccatcactttgtcttttggcatgccctgacgcattgccaggccataaatcgctaccagacaagcaaccagaatcgcggtaaacggatgaccaataaactcgaaccattcgtaagcggtagagccttccggcacaaaacgcgcggcaatggttttcagccctaccagcaccagcggcagcaggatcagcgacaggctgaatccgaaggatggcattttgccttcgccgagatgcggttcgctgatgtcgtcaggaatatgcagctcaacgtaacggctgatgaagttaccccacagcggcccggcaataatcattcccggaattgccgcacacaggccaatcaggatcatccagccaaaatcggcgttcatctgcgatgccagcagcattggcgctggccctggcaccaggaacgccnccgcggccgccacgcctgcgaataatgggattaccagcttcaccaggttcgtaccggtgtggcgcgccattgagaaagcaacgctaatcagcagaacaatcgccacttcaaagaacagcggtagcgcacagaccagccccgcaaggccgatggcataatgcgngcggctgtgaccgaaggatttaagcattttgacggcaatctgatcgactgcgccggtttcatgtaagatcttgccaaacatagctcccagggcgacaaccaccgccaggaagccgagggtgcctcccatccctttttccatcgtcgctgcgattttatcgagcggcataccggaaaaaaggccagcccccatggacaccaccattaaagccaggaaagcgtgcatacgcgccttcatgactaaaaacagcagcagtaaaacagaccctactgctgttaaaacaagcgttaatgtagtcactacttatttgccttttttaataacctcaatggtgcttgccacaacaccttccagcggttgatcgatatccaccaccagtacatcggtttcgtccgcacccggctcctgcagcgtttcaaactgcgtcaccaacatttgggttttaaagaaatggcctttgcgcgctttcaggcggctttcaatcacatcaaaatcgcctttcaggtagatgaaagagagattcggattaccttcacgcagcaagtcacgatagtgttttttcaatgcagaacagacgatcagcgacactttattagtgcgctgcatagcaaacgcggcgtcgttcagcgcctgcaaccacggtttgcgatcgtcgtcattcagcggttcgccagacgccattttttcgatattgcgccgtggatggaggaaatcgccatcaagaaacgcggcatgaagttgatgcgccacttcacttgcgaccgcagatttgccgctgcccgatacgcccatcaagacgtaaatgtggtgatcatggttagtcgtgctcaaagtggtgcccccacaatacaagaattaaaaatgttacgggtaactgttatcggtaacattgtccagccggacaatatcagaagcaatatccatccgtgccttaagtgtataagtgtgagctacttcaaatttgtgnnnntaaatagatccgcccggtgacaaggtgaaacctaaatctaacattttcggtgtcacagattcgccacgaatacgcgccagcaggcgttcagcgccaatactgcccatccgctcacgcggcgtcagcacgctcgcaagtcgtggctccatcacctgaccaatgtcatgaccgtggaaaccggcaatcgccatatcgtcaggaacttttaaccccagacgctgacattcaaacgccgcgccgaccgccagatcatcattagtacagaacacgccatccagctgcggatattcccgccgtgcctggcgaatcagttcaataccggaagagtaagaagaagattgctcaaccatcacgctatatggcaccaggcctgcatccagcatcgcctgttcgtatcccttctgtttgatgatagtacgttcgtcgagacgtgcgccgagataggcaatgtggcgatgcccgcgagcaataatggctgtggtcatctggcgtgccgcttcaaagttatcaaaaccgacggcgatatcgagacacggcgactggctgtccatcaactccaccaccgggatccccgccacttcaatcatctttaaggtgcgcggcgtgtgggtacgttcggtgaggatcagtccgtcgatattccatgagagcattgattcgagacgttcttgctccatttccggtttataaccgtagtgggccagcatggtctgataaccgtgcgcgtcggtgacgctttcgattccgcgtaatacttccgcgaaaacctggttggtgagagaaggtaacaggacgccaatcgcccggctggtggcgttagagaggatatcgggcgcacgattgggaatatagcccagttcatcaagagcc

SEQ ID NO: 1532 - DNA, 4848 bp, Escherichia coli
  Strain O55:H7
  modified_base (4039)..(4042): a, c, g or t
  modified_base (4749)..(4749): a, c, g or t
  modified_base (4821)..(4821): a, c, g or t
atcttgccgcgtagagcgacggaaacctgctccgggttgcgtaaaaaacggctgaccgtcattttggtcacgcctacacggtcagccacatcctgaagtacgggtcttttctttttcatcgtcctgaaggtacaaaagagatagattctcttagtttaacacggacgcatcagaaccttcccggggaaaacagtgcttgtttacaattattagatatacactaaatcaattgcatcgcattgtgctaacgacgctgcaaaaccccggaagcgtacatcagcacgcgaccggagcgagcgaggaagcctgcaaaaaggcaggcttcaaagatgccgttgagctttaaaccggcggcagatcgaacagtaacacttcgctgtcgctatccgcatggatggagattgcctgctcatcccagattgccagaccatcgctgatcgaggctttcacgccgttaatggtgacattgcctttcaccacctggatccagacgcggcgttcagcggcaatctgatgcaccgactgctcatctttcagcaacgcccagcggtacagttccatatcctgatgcactttcaatgaaccatcacgcgcatctggcgaaagcaccagttgtttgccctgcactgcatcgaagcgacgctgttcataacgcggcgtaatgccgttttcttccggcatgatccagatctgatacaggtgcagacgctcggtgctgcttgggttgtactctgagtgacgaatacccgtacccgcactcataatctggaactcgcccgccggaacctgctctttattgcccatgctgtcctggtgctcaacagtaccttccagcacgtaggtcaaaatttccatatctttatgcgggtgagtgccgaagccctgccctgcttcaatcacgtcgtcgttaatcacgcgcagcgcggagaagcccataaagttcggatcgtaatagttggcaaaagagaaagtatgccaggagtccagccagccatgatttgcatgaccacgttcatttgctttgcgtaagtagatcatttgtattcgccccctgaatgatttcgatgggcttagtgtggacccgatctgcctgggatgatagagggtgaaaattgacccctctgttcaaaaaaattgaactattcgaggggccatcaaacttacttcgcgagagtcactgtggagggagaggcttgctcgaatccgcgttcaagtatttccagattcgtaagaacttcagattccttgacgtaatttggcgcaccgtgggtgatggtttgatacaacgcatcataaacgcgcccgtaatcgcccatctccggcttcatctcttctctgaccgtcacgccctcgtcattgacatactccagcacaccgaccgaatcatccgctgcgaatcccggttcgcccggcataatattagccttcaggctggtttcctgctggtcgataccatatttaataaacgaacctttcttaccgtgaacgataaatttcggataatcgattttcaccagatggctggttttgacgatggcttttagatcgccataaaacagttgcgcttcgaaagtatcgtcaggattggctttattgcgcaggctgcggatgtcataagcgacgtgatccgggcgaccgaacagagaaataatctggtccatcgtatgcacaccaaggccatagaacgcgccatcctgcggcagcccaggtttggtttctgccaccgggcggtaatagtcaaaatggctttccacttcgacaatctctcccagcttgccgctttcaatcgcttttttcgccgtcaggaagcaggaatcaaagcgacgattctgatatggcgtgacggtcagccctttgcttttcgccagtgcaaacagctctttcgcctgcgcaagtgtcggagtgaacggtttttcgaccagcacatttttcccggcttccatcgcgcgcttcgcgtactcgaagtggctgtccgcatgggtgcagacaacaaccagcttaacatcgggatcgtttagcacttcgttgagatcgctggtgaaatggatatgagagtaaatgggagcttgttcttccggctttgcatggcggcgaaaatatgcgcgacatgccagctatccttgcggttaagtacatacggcagatggtaacgggtggtgcttttgccgaagccaataaaggcgcagttgatgaccatgatttcgtcctttttaaggtggttatttacaccttagcgcaaagcggacgtggttcctactggagtgcgcataacgaacacaagcacttcccgaggataaattgagaacgaaagatcaaaaaaaaaagccagcacccggctggctaagtaatactggaagcaatgtgagcaatgtcgtgctttcaggttctccgcgagggtcttcctgattgcgagacaataataatcattctcattcgcacttgtccaacactttttgcaaaaaaatgcatttgactcgcattcgaaagtcaatgatgttgaaagggacatttaccccaaagaggacaaaggaatgagtgagatagtgatacgccatgctgaaacacgggattacgaggccatcaggcagattcacgcccagccggaggtgtattacaacacactacaggtgcctcatccttccgatcatatgtggcaggagcgactcgccgatcgtcccggcatcaagcaactcgtcgcctgtattgatggagacgtcgtgggccatctcaccattgacgtgcaacagcgcccacgccgcagtcatgttgccgattttggtatctgtgtcgacgcccgctggaagaatcgcggcgtcgccagcgccctgatgcgagagatgattgaaatgtgcgacaactggttgcgggtagatcgtattgagctaacggtgttcgtcgataacgcgccagcaattaaggtctataaaaaattcggctttgagattgaagggactggcaagaagtacgcattacgtaatggtgaatatgttgatgcgtattttatggcgcgggtgaagtaaagaattttctcaaattgcctgttaccaatgtgaataattagttttgttcatctaatttgagtttttccttatattaccaccatcattttgaaacaatttgtaacatcaagagacctttgaatcattactcgttaatatttcttattaaagagaacatattttcgcaagcaatagttattactgtttgtttatggatagagagtctacttaatgggtacagcagctataagtcatttacgatatgatcttaacaaatatgccctttctttacgcaaaaccgcaacacttgcttcaacattttttattgagtccccattagttagattcgagtatctgcaagaaatagaaaatactattaatgatattactcacagattcaattcttcatatgacatcaatgaaaaagcacgacttatcaatgaattaaaaatggagtcagaaacagcaagaaaagaatatcaacttttcagacaaggaaattatgataaatatatcactactgatattttcgaagaacatggtttgataaaatatgtgaacttaagtttcgatattgttgcatctgtaggacaggtcgtaggcggggttggcgcgttgaaatttggtaaggtagtgcattcaaaccgaataaaaggtataggcgtcacattagttgctcatggggcgaataatttttatgaaagcttatcacctttattttttaacgagtatgattcagatccaatacgtgaactctacagagtaatagcaaaaaaaatgggaggtgatattaattctgctgattatgcatacagcatcgtggacttttcgattactgcatatggtggatattcaggcatgaaaatcgtacctaagtataatagattgattcgtccttcattaggaaatagacctggtacaggacgattatttcattacacatcagttgattttaaaaataaattctcattaaaacctacccctttaaaaatcatacaaattagttctactgtaaaaaaattcaaggttacattttatgnnnnaaatacaaatttgaggataaaacatggcctcaataatcatatgccacatcaattattaatgaatatatcaggaactacaactggtgcaggaatacaataacagaataacttaattttaagataaaacattttgaggcataattggtaagagaatttagtatccagttttctgtgtatgataagaatagcgaacatggcaatactaacgattgaagacagaaaaaaacttttcaacatattatcctgaaaaaatgagaatacaagcaatatcccattaactatacttaccaacccaaaccccaaagagcaataacccaccattgaaataatagcatcaatgaaattttgttctacgagagagacttcatgcttattagcaagtttcttcatttctttgtatcttgattttaaatagaagagttcttgtttattaagtacagagagaatcacgtattttgctttcattattcccccttaaaaacactttacaaaatcgatcaaagtcatgatgaatgccattatgcacataaacaacacaaagcgtgatatttaaatcaataaattacactctaaaatgaactataactacagtttatttaatagcatagttaattcctttcctgaatatcaggaagtaattatcgcacgtcctattttcacggtaaatgaaaaactattctgcatactcttgaaaagaaagcataacntaagccccttaaaagcattcaggataattatgattatatattacggagcaatagtaaaagcaatccagacantaatttatcttgttcaagaaaacagcc

SEQ ID NO: 1533 - DNA, 3723 bp, Escherichia coli
  Strain O55:H7
  modified_base (1772)..(1772): a, c, g or t
  modified_base (2132)..(2132): a, c, g or t
  modified_base (2563)..(2563): a, c, g or t
cgaagagggccgctaaccttagtaccccgccgttaaatcatccaccgagcgcgggtcggatgcgccgtacaactcaccgtccggcccaaccataatgctttgtgtactgcccatcgcctctttcagcgccactttctgaccttttgcttccagcagcttgagcgtatccgggctaaaccctttttcgacacgcagctcgtccggcaaccactgatggtggaaacgcggcgcattagtcgcttcggcgacgttcatgccataatcgatgctattcaccaccatttgaagcactgtagtgatgatccggctcccgccagggctaccggtgaccagccaggttttaccgtctttcaccacaatggttggtgacatcgatgacagcgggcgtttgttcggcccgacggcgttggcatcaccgcccaccagcccgtaaacgttcggtacgcccggtttggcagagaaatcatccatttggttattgagcaaaataccgctctcgcccgcgacaatacccgtaccgaaggtggtgttcagcgtataggtcaccgccaccgcgttaccgtctttatccaccaccgaataatgggtagtttgattactctcataaggcgcaagcttgccggggcgaatctcgctggacggtttcgctttattgatatcgatttgctcggcaatagatttggcataggctttattggtcagcgcctgccacgggactttcacaaaatccgggtcgccaagatattccgagcggtcagcgtaggcatatttctccgcttctgccatgatctgcatcgcgtcggcgctgccaaaaccgtatttcttcatatcgaagttttccagaatattgaggatttgtacgatatggatcccgccggaggatggcggtggcatggagtaaacctgatacccgcgataatcgccgcttatcggtgtgcgttcgaccgctttatacgccgctaaatcttctttagtgatcaggccaccgtttttctgcatctcctgggcaatctgttccgctatcgtgcctttgtagaattcgtccgggccgttttcggcaatcatctccaggctctttgccaggttcgcctgcaccagcttgtcgccctttttcagcggctcgccctctttccagaagatagccttgctgttttcgtgattcggcagcacttcgctcccgtaggttttgagatcgtcagccagctcgtcgttaacgataaaaccatcgcgtgccagtttaaacgctggctgcaccactttgttcaacggcattgtgccgtatttatccaacgccagcgagaaaccagcgaccgtaccgggcgtgccggaagccagatgcgaagtgagtgattttttgctgtccgggttgccctggtcatcaaggaacatatcgcgggtcgctttggcgggtgccatttcgcggaaatcgatagcggtggtattgccatttttcgagcggatcagcataaaaccaccaccgcccagattccctgcctgcggatgcgttaccgccagcgcgtagcccacagccacggcggcatcaacggcattcccgccctccttgaggatatccacccccacctgagtggcagtagcatctacagatgccaccatcccctgtttcgcgcgtaccggatgaaagacatcttcctccacgccgtaagaaacaggagacggcgcaggtggcgcggctaccgtactaaaacaacttcctgtgaacagagcagcaatggccacccggcgtaaaaacgtcggttttatcatcgttattntccagagattaaggggcaaccccagctaagcctggtatataactctgaattaatcctgatgattgcaggaaaggagtaaacttaaagaatatcttcagaggaggatacgcgatgaaacgacttctgattcttacggcactcctgccgtttgtcggctttgcacagcccattaatactctgaacaaccctaaccagccggggtatcagatccccagtcagcagcggatgcaaacccagatgcaaacgcagcaaatccagcaaaaagggatgctgaatcagcaactgaaaacgcaaactcagttgcaacaacagcatttagaaaaccagataaacaataattctcagcgggtgttgcagtcncagccgggggagcgaaatcccgcccggcagcaaatgctgcccaacaccaatggcgggatgttaaacagcaaccgtaatccggatagttcgttgaatcagcagcatatgttgccggagaggagaaacggcgacatgctgaatcagcccggcacgccgcagcctgatataccgttgaaaactattgggccgtaaagttcggaccaatcacatcaatcgcatcggtacagatgcaatccacgccccagcgcagcaactctgccgcgcgctggggtttattgacggtataaaccagaatccgtaatccggcgtctttcaactgcatcactcgcgctttatcgagcaacttatgattgagatgaatagagacgcagcccagccgcgcggtcagttctcgccagtcgtcgcgccactcatccagcaacaaaccgcgnggcagttctggtactgcctgttgtgcggcttctaaagcatcaatctcaaacgatgacagtagcggcggcgtcataccggcccacagctcgcgtgccgccagcgccaccattttgcccgttaatggcccagtgccagtggtgggtttgatttcgatattcgccatcatcccatgttcgcgacagcgttccgccacctgcgaaagcaacggcagcggctcacctttaaacgctttgccgtaccaactgcctgcatccacacgtagtaaatcctgccagttcagttcacccgcgacgccccagccgttgctggtacgttcgagattgtcgtcatggagcaggaagatttcgccatctttcgacaacttcgcgtcaaattcgatcatcttatgaccgtattttgccccgacgtcgattgccgccagggtgttttccggggccagtttaccgccgccacggtgggcgacgatgcggggataaggccagttactcatactcgttgtcctgtttcaccatcaaaaagatgtagctgattttccggcagatgcagccacagcgtgctgcctgccgtcgggcgctcctgatgcgccagccgtaccaccagcttctgttcgccccagcgtccgtgcgccaggttatctgcgccgaggatctccagcgtgtccatcaccagcggcacgccgccttctgcctgcgagcttagcgcgatatgttccgggcgaatgccgagagtcattttacgccctgcatactgacggtagccaccgtttagcggcagcgcaatgccgccgtccagctcgaagtgcgtgccttcgttattcacgcggcctgtcagcagattcatcgccgggctgccaataaaactcgccacaaacaggctggcgggcttttcgtagacttcaactggtgtgccaatctgttcggcaacgcctccgttcatcaccattactcgctgggcgagggtcatcgcctcaacctgatcgtgagtaacgtagagtgaagtcgttttcaggcgacggtgcagctgttgcagttcaagacgcatctgtacgcgcagcttggcatcgaggttagagagtggctcatcaaacaggaacaccgccggatcgcgcacaatcgcccggcccatcgccacacgctgacgctgaccgccggaaagctcg

SEQ ID NO: 1534 - DNA, 2145 bp, Escherichia coli
  Strain O55:H7
  modified_base (1245)..(1245): a, c, g or t
gcgcttaagcagaccgtccagttccagaatgcgcgccgcctctttaacgcgctcggcaatttgctgcttgcccatgccgcgaattttcagcccccacgccatgttttcttcaacactcatatgcggataaagcgcgtagttctggaacaccatcgcaatcccgcgatctttcggctccatttcggtcacccgctggtcgttgatccagatatcgccttccgtcacccgctccagcccggcaaccatgcgcagcagcgtcgatttcccgcagcctgacggcccgaccatcacgataaattcgccatccgccacatcaagggtcagcggtttaatcacctgggttttgccatcccagcttttggttactgcctgtaatttcagtcctgccatcttatttctcactatcgaccaggccgcgcacgaaggcacgctgcatcactaaaacaatcactactggtgggatcagggttaacaacatcgccgccatcactgagttccattctgtggtgccttcgccagtggcgatcatccctttgatccctgccacggtggtgccgagatccacgtcggtaataatcaacaacggccacaaatactggttccagccgtaaataaaggtgatcacaaacaacgccgccagattagttttggacaacggaaaaacgatgtcgcaaaagaagcgcattggcgacgcgccgtcgatccgcgcggcttccaccagttcatccggtagggtcataaagaactggcggaaaagaaacgtcgcggtcgccgaggccatcagcggcagcgttaaacctgcgtagctgtcgagcatcttcaggttggcgatgacttccaccgtcgggaagatacgtacttcaaccggcaacatcagggtgataaaaatcatccagaaaaagaggttacgcagcggaaaacgaaaccagacaatggcgaatgccgagagcatcgagacggtaattttgccgagcgtaatgctgaacgccatcacgaagctgttaagcaacatccgccagaacggcgcactatttgtgcctaccccgtttacccagatgttgtggatgttttccagcagatgcgtgccggggatgagcgtcatcggcgcggcgtagacggcctgtttatccagcgtcgccgcgacaaacgccacgtacagcgggaataggatcaccgcgatcccgaggatcagcatggtatggctgaatatcgtcagccacggacggttctcaatcattggtaacncaccttgctttcaacatagcggaactgcatcaccgtcagcacgatgacgaggaacatcaacaccaccgactgtgcggcagacgaagccagatccagtccggtaaagccttcgcggtagatcttataaatcagcgtcgtggtggcctgaaccggcccgccggacgtggcggcgtcgatcaccgggaaggtgtcgaagaaggcatacaccaggttcactaccagcaggaagaaactcaccggggcgataagcggcagcgcaatcttaaagaagcggcgaatcggccctgcaccgtcgatggctgcggcttcgatcaacgaacggggaatggattgcagcgcggcatagaagaacaggaagttgtagctgatttgcttccatactgaggcaaacaccaccagaaacattgcctgaccgctgttttgcgcgtggttccagtcgtagccgaactcagcgagaaaatgggtgatcagcccgcgaccggggttaaacaggaagatccacaatacggcggcaacggcgggagccacggcatacggcagcagcatcaaggtttgatagaaacgactgccgcgcacgatgtactccaccagcgccgcaaagaacagcgataccagcaaaccgctgacggtgacaaaggtgctgaattttatcgtcgtccagaaggagtcgatatagtagctgtcatgaaacagcgcgacgaagttatccaggccgacaaaccggctggagaaaccaaacggatcgacgctttgcagcgagtaccacaacgcttcgcccgcaggccagataaaaaagataacggtgatgatgagctgcggcgcgaccagcagataaggcagccagcgcgagcggaacaccgaacgggatgatgacattacggttaattcctgaactgtgcc

SEQ ID NO: 1535 - DNA, 13812 bp, Escherichia coli
  Strain O55:H7
  modified_base (9395)..(9395): a, c, g or t
cgcttcgcttatccggcctacacgcgatgccaggtcagataagcgaaacgcatccgacattacactgattaagacttcgtcgatttctcaaagcggcgcagcaactgatttccacgctcaacggcggtatccagtgcctgctgtggtgtcttcttaccggtccacacgctctccagctcttcatccacaatcacgcggatctgcggcatgttgcccagacgcagccctttggtgaacggcaacggcggcttattcagcatctgacgcgtcgcggtatccgcccctgggtttttctcataaaagccctgctcacgggtcaggtcatacgctgctttggtgattggcagataaccggttttctgatgccactcggcagcgttttctggcttcgcgaggaagtcgaggaacttcgccacgccggtatacgtttctttatctttgccctgcatcacccacaggctggccccgccgataatggcgttttgcggtgcatctttcgcatcggcgtcgtaaggcatcatgcctacgccatagttgaatttggcgtactcgcgaatattagcgagagaaccggaagaggcggtggtcatagcgcaatcaccgttatagaacttctcggtggattcatccttacgcccgacgtagctgaaatcgcccttcttgttcatctcttcgagcatggcgatgtgtttcacctgctccggcttgttgaactccagcaccgcatccgtgccgtcaaagccgttgtttttgctggcaaacggcagaccgttccaggcgctaaagttttccagttggatccagccctgccagccgctggcgtagccgcacttcatgccggaggcttttagttttgcggcatagtccgccagatcctgccaggttttcggcggttgttccgggtctaaccccgctttcttgaaggcgtctttgttgtaatagagaacgggagtcgagctgttgaatggctgggagagtaagtggcccgttttgctgtcggagtagtaaccggaaaccgtcggcacaaactgcgactcatcgaattgaatccccgcctctttaaacacgtcataaaccggtttaatggctttcgacgccatcatggtggcggtgccaacttcataaacctgcaaaatagccggagcattgccggtacgaaatgcggcaatccccgcgcttaaattctgttcgtaattgcctttataggtcggtacaattttgtaatccgggttttcggcgttaaaacgttgggccagagaatccacctctttacccagttccccttccatagaatgccagaacggaatggtcgtcactgcctgtgcattccccattaacgccagtccgagcgccagtgctgaagctgtataatgtaacggtttcatcgtttatctctcttgttgtaccgaatgcgcgaattcacgcgttttatgctcgcggggtaacatgacatgctcgaattacagaaaaataacttttttgttacatttgtaagatagtaaggtgtcagaaagatgacaaggcggtgacggtacgggtgagggaaaatgggagatggggcacggatatcccgagaatgcactgaaaagaggcgattaacggccagctaatcgccagaactccttaccatgaagagcaaaaatggcagcaaattctgcgtccaattttgctgcccgatgagagctacatttttcaattttaacaaaagattgccgcgacactggtctaacggcaaagaagattttcattgcaccacactctgcttcagccgctcattggcggtcttaatccattcccggtggtgttttctataatgaggtcttgagcgtttagccgtatcaaccacggcaacatactgctcgttggcttcacgtaaccgactcattttcgccaacatttccgcatagtaaatacgcgcctgcgggccggggtaataagaaatcaatacttcaaactcgctttccgcatcagcgtatttttcttgtgcggctaacgttctggcaaataacaaatgcccgtctgccgactgaaaatcagggttataacgcatcacatcttccagcgtctgctgacaggcggcgaactcctgaatagcaaactgtgcctgcgccaggcttagcatcattgccgcttcatgggcgaatatcccgcttaacgcctgctgataatggggaacagcttcgtgataacgccccagacgcgccagttcattagccaacgcataatggttttgattcgtctcggcaatcgccagttcttcggttaatttgcgcaggtggcgctcagggttgagtttgtcctgcaggcgcatcagcaaagtatgcccgtgacggtcagcgcccgtttcaggcagcatcactatgacgaaatacgccacgcagccaatcaccggaaaacagaaaatgataaaaatccagtaccgctcttgtccggtacggtaagcgtgaatacagcaaagcagttcaagcatgacaacaacggcataatgcatgggagggaacctttccgtggcaaataagtggtctggttttaatcctcccggtcagttgaaacaagtctgtatacggacgaataacccggcagaacttagctgccgggttatcgataatttacccgcctaaatacgcacttctcactgcttcgttcgccagcagcgcatcaccagtatcggagagcacaacatggccgttttccagcacgtagccgcgatcagcgagcttcagcgcctggttggcgttctgctcgacgaggaagatagtcatcccctgctcgcgcagctgctcgatggtgtcgaaaatttgctggatgataatcggcgcaagaccgagcgatggctcatcaagcaacaacaaacgcggattgctcatcagcgcgcgaccaatcgccagcatctgctgttcaccgccggacatggtgcctgcccgctgaacacgacgctcatgaagacgtggaaacagctcatacacccactttatgcgctcctgaaactgatcacgttcggcaaaaaagccgcccatcgccaggttctcttccaccgtcatccgcgagaagacgcgacgcccttccgggacaatcgctaccgcttcgcgcatgattttcgccgtctgccagtcggtaatgtctttatcatcaaacacaattcgcccgctggtggcgcgcggatcgccgcataacgtgccgagcaaggtggttttccccgccccgttcgcgccaatcagcgtgacaatctcgccctgattgatatgcaggctcacctcatgcagcgcctggattttgccgtagtgggcgctgactttgtcaaaggacaacatgactttttccatcttatgcctcacctaaataggcacggatcacgtccgggttattacggatttgctccggcgtaccgtttgccagcggcgtcccctgattgaccacgtaaattcggtccgaaattcccatcaccagcttcatatcgtgttcaatcaacaagatagtggtgttgtgatgattgcgcagttcggcaatcagctcatccagctctttcgtttctttcgggttaagacctgccgcaggttcgtcgagcattaaaatctccggctgcgtcaccatgcagcgggcaatctccagacggcgctggtcaccgtaggccaggttactcgcctgacggttggcgtgttccagcaaaccaatgcgctcaagccaggtggcggcgcggtcgagcgcttcactttgggcgcgacggaaagaaggcgttttcaacaggccagagaacagcccggttttcagttgctgatgctgcgccaccagcaggttttcaattaccgtcatttcgcggaacagacgcacatgctggaaggtacgcaccacgcccatgcgggcgatttgctgccccggcaaaccctccagatgctgatcgcgcagtaaaatagtgccgccggtgggtttgtagaatccggtcaggcagttaaagaccgtggtttttccggcaccgttaggaccgattaacgagacgatctcctgcgggtacaattcaagattgacgttattcacagccagcaggccgccgaagcgcatcatcaggccgttaacagataataatggctgactcatgcctgctctcctttcgctgcgccgtttttcagcttcagttgcgggcgcgtcatgggcagcaagccctgcggacgccagatcatcatcagcaccatcaaaccaccgagcattaacatgctgtattcgttgaaatcacgcatcaactcgcgcgacaccaccagcaaaattgccgccagaattaccgcaaattgcgagcccataccgccgagcaccactatcgccagcacaaacgccgattcggcaaaggtgaaggattccgggctgacaaagccctgacgcgcagcaaacagcgttccggcaaaaccggcaaacgcggcgctgatggtaaaggcagtcagcttgatacgacgcgggcttaagcccagcgaacggcaggcgatttcatcttcacgcaacgcttcccaggcgcgacccagcggcatccgcagcaggcggttaatgacaaacaggcttagcaccaccagcagcaacgccaccaggtagaggaaaatgacacgatcggagggatcgtatttcaggccaaagaaattactgaacgtgtcccagccgccttcacgagcggtacggctgaactcaaggccgaaaaaagtcggtttcgggatctgactgataccgttcggaccgccggtaatttcggtgttattgagtagcaatatgcgcacaatttcgccgaaaccgagggtaacgatcgccagatagtcaccgcgcaagcgaagcaccgggaagccgagcaggaagcccgccgccgccgccatcaacccggctatcggcagacaggtccagaagcccaagccgtaatagtgattgagcagcgcaaaggtataagcgccgatggcgtaaaagccgccgtaccccagcaccagcagaccagaaagccctaccaccacgttcagcccgagtccgaggataatgtagatcatggtcagggtggcgatatccaccgtcccgcgtgagaccataaacggccacgccaccgcaagcaccagcagcgccacgagaaacagcttttgcttcaccgtggagccatcaatggcgggcagaataaacttcggtccggaaacgcttttcaaccctttctggaaagccggtcgcaaaagctggaagaaaaagaccaccgccgtgccgataaacacccactgccaacggatgtctgaagccgtgtcgaccaccagtttggtgccatccagctccagttgtacgcccataaagacgcccgccaggacaaaaaacatcgcggcagagagcaacgccattgcaatatgcatcggtttcatactttctctacctccgggcgacccagaataccggtcggcatcaccagcagcaccagaatcagcagggcgaatgagaccacatctttatattccgtactcaggtaggcagaagagagcgcctccgcaatccccagaatcagcccgccaatcatcgctcccggaatgctgccaatcccaccgagcaccgcagcggtaaaggctttcatcccggccataaagccgatataggggttaatgacgccgtagaactgaccgagcagtacgcccgccaccgccgccatcgccgcgccaatcacaaaggtcaaagcaatcacccggtcggtgttaatgccaagcaggctcgccattttcagatcttcggcgcaggcacggcaggcgcgccccatacgggaataacgaatgaaaatcgtcagcgccagcatggcgaggaaggtgacaatccagatcaccgcctgcatggtggtaatagaggcagagaagttttcgctatgacccactacccactgaccattaaacaagctgggcagcgccacgtcgcgcgaaccttcagtcaggctgacgtagttttgcaggaagatggacataccgattgccgagatgagtgcaatcaggcgcttagagttacgcaccgggcggtaagccacccgttcgatactccagccgtaggcgctggcaatgacgattgcgccgacgaatcccgccgctaccagcagccagccggtatcaatgcccatcatcatcagtgcggcgatgatcataaatgagacgtagctgccgatcatgtaaacctcgccgtgggcgaagttgatcatgccgataatgccgtaaaccatggtgtagccgatggcaatcagcgcgtaagtactgcccagcgtgacgccgttaaacatctgctgcaagaaatacaaaaactgctcagacataaggtaacctttctaaacccgcccgcatttcacgggcggtgggattttcacttggctgccgtggatgaaccgtcggcgtgccactggaagacaccaaaatcaaatcccttaagatcgcctttttcatcccagttcagcggcccaatcacggtgtttgcaccgttagcttttaaatctttcaccagcgccagcggctcatcgctgccggtacgttcaagggcagttgccagagattgcaccgccgcgtaggtgatccagacataaggcccggacggatctttcttgtctgctttcagcgcatcaacgatgccctggtttgccggatcctggtcatagcgttttggcatagtgaccaacatgccttcggcggcatcaccggcaatgttcgacaacgacgcattacccacaccttccggccccataaactgggttttcaggccaacggaacgggcctggcgcagcatctgccccatttccgggtagtaaccgccgtagtaaacgaagtcgatgttttcttttttcaggcgggcgatcagcgcggagaaatctttctccccggcggtaataccgtcgaagaagacgacgttggcgttagccgctttcagcccgtcctgcaccgaacgcgccagcccttcgccatactgttgtttgtcgtgaatgatggcgatgcgctggggcttcaccgtctcaagaatgtattttgccgccgttggcccctgggaagagtccagcccggcagtacgcataatgtgttgataaccgcgttgggtcagctccgggttggtcgctcccggcgagatcataagaataccttcgtcttcatagatatctgacgcaggctgggtagaagaagaacacagatgaccaataacgtatttaatgccgtcattaacgattttgttggcgaccgcaacggcttgtttcgggtcgcaggcgtcgtcatattctacgccaaccagcttatcgcctttaattccccctttggcattaatgtctttaatcgcctgacgcgcgccgttaaattccatatcgccccactgggcaatcgggccggacatcgcgccgacaacggcaactttaatatcgtcggctaaagcggtgtgtgaaattgccagtgcaatcatccctgcgatgatagttttcgcattccgtttcatagtcaaaaatccccattcgtgatgttgtgttgctttgtttttatgtgttaacaaatcagactgttctttttttatactgcactgtttttgcctgtctgattaagggtttagcgcagtattttgtgataatagcgattaaagtccctatttttcagtcgattaagaacagataatattctgaatttattgatagataaacagaaaaaagtgcctttgtcagcataaaataacggcacaaagggcggaataattcactaccattcaggggattatgctgggtatttttcattctctaatgttttaactttgtaattattgctgttaaaaaattaatcacctgccaaaagaaataaaaaagagaaagcctccgattaaattatttcgctacactggttccacttttgtgatttacacgggttacccatgaagctgaccatcattcgattagaaaaatttagcgaccaggaccggattgacctgcaaaagatctggccggagtattccccttcctctttacaggttgacgataaccaccgcatctacgccgcgcgttttaacgagcgcctgcttgctgccgtgcgggtaaccttaagcggcaccgagggggcactggattccctgcgcgtgcgggaagtcactcgacgtcgcggtgtggggcaatatctgctggaagaggttttgcgtaacaatcctggcgtttcatgctggtggatggcggatgcaggcgtggaagatcgcggtgtgatgacggcgtttatgcaggcactgggatttacggcacagcagggcggctgggagaagcgttaatcgctctgtgtaaaaagcagttcaatggatttggttgggaaaaataacgcattttcgttttccccgactaaagggataaagcccagcgatttataaaacgtatgggctttttcattcagcgcctcgacaaaaagaccgtgaatacctaccgctaaagaggctgaccagacgactttcatggcatgagcaaccagtgttgctccccatccctgcccctgtaatgaacgatcaattgccagacgcccaagagtaacgctgggaatatttttgtagggaatttttttctgtttcgatttcgagggcaatgcggctcgttcaaaacaactgccgcataatgtgtaatatcccagcacctgacgttctggagtgttgcgacaaaggatatacgctcgcagaattttgttgcgatgttgacgaacgagatgtgtcgtcagaaagagatttaacgcttcctcgccgcagtcgaatcgctgtagatcataatctgcatcatcggtcagaatctctatcgtcagatcatccataaattattacattccctgaagacgttttgccgcacgttttagcttttcacctggtgacggtggattactcagcgcatccatcacccgcgtccaggattcctcattgaggatcacccgccgatgctgttcaatcacttccgcagcccgctgcgaagcgctgttcaacataaattggctgacggactgattagatatcgctgccgcttcctcaatcatacttttgtcatcgtcagttaaacgcagatcgatacgctgctttttaacagcagacatgtgaactctcctgctccgtataatatgtacggtatgtcaccgtacattaagcatatcctggattgtttaatctttctacaaccatttcgacaaacacaaaaaaacccgatggcagttcagcgcatcgggcattttcatttatctatctgttacttcgcatcggttgccgtgccgttggcgtgccagtcaaacacaccgaactcaaagcctttcagatcgcctttctcatcccaggtcagcggtcccattacggtatccacggagttcgctttcaggtatttggcgatttcagccggatcgtcagactgattcaggcccgcctgcaaagattgcagcgcggcgtangtggtccaaacgaatgcgccgcttgggtcctgttttttcgctttgatcgcatcaacaatgggtttgttcgccggaacctgatcgtagttcttcggcttggtcaccagcagcccttccgctgattcgcccgcaatgttagacagcgagacgttagccacgccttccggccccataaactgagttttcaaccctgccgcgcgtgcctgacgcaggatttgccccatttccgggtgataaccgccgtagtaaacgaagtcgatattctcttttttcagacgcgccaccagcgttgagaaatctttttccccggcggtgataccatcaaagaacaccacgttagcattgcctttcttcaggccgtcctgcaccgctcgtgccagaccttcgccgtattgctgtttgtcgtgaacgatagcaatacgctgcggtttcactttctcaagaatatatttcgccgccgtcggcccctggtcggagtccaggccggtggtgcgcaggatcagctgatagccacgggcggtcagctccggcgcggttgccgctggggtgatcattaaaatgccttcgtcttcgtagatgtcagacgcaggctgcgttgatgaagaacagaggtgaccaatcacgtatttaatgccgtcgttaacgactttgttcgccaccgcaaccgcctgtttcgggtcacaggcatcgtcatattttacgatttgcagtttgttgcctttaatgccgcctttagcgttgatatccgcaaccgcctgctctgcgccggtaaactcctggtcaccgtactgcgcaaccggaccggacattgcgcccacgaccgcgactttaatatcttctgccagagccatattgctgaatgccagcgcgatacatcctgccagtaacgctttaccctttatgttcatcctgagaatccccattcttctggttattacgtgtgttgtgatgttgttgttcagcactttatttcgttttatgcatgactacccgtgctttagcagcatactctgctaaaacatacccgatttttatgatattggaatagctattttgacagtttattaacaatctgcgtggggattggcgttttgccggaggggaaattgattattgtagaggcccaaaaaacaaaaaccccggactcgcatccagggttctctgcttaatagcggaaattacgcttctatagcagcgcgcagttttttcatcgcgttcttttccagctggcgcacacgctcagcggaaacaccgtaacggtcagccagttcctgcaacgtggacttgttgtcttcgtccagccagcgcgcacggatgatgtcctggctgcgttcgtccagaccctgcatcgcgtcggtcagacggtttgctgcctgctcttcccagttatcatcttcaatgccgtcggcaaagttagatgatttatcctgcagatagagcaccggtgccatcggttggctgtcggaatcgtcgtcggaagacaggtcaaaggtcatgtcctgtgccgccatacgtgattccatctcacgtacgtctttgctggttacgcccagttcacgggccaccatttcgacttcatcctggttaaaccagcccagacgctgcttggttttacgcaggttgaagaacagtttgcgctgcgctttggtggtcgcaactttgacgatacgccagttacgcagaacgtattcgtggatctctgctttgatccagtggacggcgaaggagaccaggcgcacacccacttccgggttaaaacggcgcactgctttcatcaggccgatgttaccttcctgaatcaaatccgcctgtggcaggccatagcccgcataattacgagcaatatgaacaacaaaccgcaggtgagacaggatcagcgttttagctgcttccagatcgccatggtaatgcagcttttcagccagcgcccgctcctcgtcagccgacaacatcggccacgcgttagctgcccggatgtaggaatccaggttgccaactggggctaaagctaaactttgcattttgtcagtcattcaaatcctctcaatcgatatcttctggcgcttcagtggtagcaacaactgtgccagagcttaagagcaacgaggttatcattcactgttttatcagaccgtgattttatccacaagttcaatgcaggcttgtgaataaattacgcacaaaatgtgacatagagatgaaataccgggaagagacaacggggtctctttccctgctacggaacccattgcagggaaagagtataacacgcttttattattcaggcgtaaagtggcgtaaatgttgtaccgtggcaagccacgctgccacccagccaatcatcgagcataccagcagcaacagcaggcattcatcgaacgataaaccattgatatcaaacttcgttccgaaaacctgtgccacttccgcaaccgccgatgacaatcgcagtaccagaatttctgacaaaattaatgacaacaatgcgccagaaaaccccagcaatgcgccaccgtacaggaacgggcgcaggatgaaaccatccgttgcaccaatcagtttctgcacgttaatggagtcacgacgagcaaagatactcaggcgtacactgttaccgatgacgaggaacactgccgccaccatcaacacgccgatcatcgccgaaacgcgcccgaccagcccggtcaacgccgccagacgggcaaaccagctgtcatccatccgcacttcgtcaatgccgttaatctgcgtgatacgatcacgcagcgtattcagagactccgtcccctgaaagtcgagcttcgggatcaccaccgccactgccggaagcgggttttcttccagcatatccagcgcgccaccaaaaccagaccagttacggaactcgcccagtgcgtcttcacgagaaagatagttcactttctctacgccttgctcggcctgcaactgtgccaccacgcccgcagcggcgtcatcgtccagcgttttttgcagataaacagtgatttgcggtgacggataatactgcgtcgccgcctggttaacgtttttgtacaccatataacagacgctgggcagcgtcagggagatggcgataaccatcaccgttaaaaatgtggcgaacggtttgcttttcagatcctgcaatgcgccgtggaaggcatagcgcacctgttcgttgaaaacgttggttttgcgatttaccggttttggcgaggatttcgcgcgtttcggtgcgttacgaccgccgtcgcctgagccgccgaccgatttacggaagcgatcaagacgcccgccaaactgccgaatatgattgattgcatcgcgcttattcatggcccacgcctccatgcaagtgaccatcgctcagggtgagcatgcgataggaacgccgtgaaatcaggttgatgtcgtgcgttgccatcaatacggttacccctacgcggttaaactcttcaaacagacgtagaatcccttccgacaacgcgtcgtccaggttaccagtcggttcgtccgccagcagtaccgcgggcttgttcaccaccgcgcgggcaatgccaacacgctgttgttcaccgccagaaagctgaatagggaagttcttcgctttgtccagtagcccgactttatccagtgccgccgacacccggcggcgaatatcgtcaccgctggcaccggcgataatcagcgggatcgccacgttatcgtagacagtacggtccatcagtagatggtgatcctggaaaatcatgccaatctggcggcgcagaaacggaacttcacggtttttcagacgcgtgatgtcatggccgctaaaccagattttcccggcgctgggccgctcaatcccacagatcagcttcaggagggtacttttccctgcgccggaatgaccggtcagaaacgccatctcacccggctgcatatggaacgtaacgccctgcagcgcctgtctcccaccgagataagccttgctgacatgttcaaagcgaatcattgttaatcctctcgggcaaaaagtgcctctataaagtcgtccgccttaaacggacgcaaatcctcaatacgttcgccgacaccaatgtagcggatagggataccaaactggtcagccaccgagaaaattaccccgcctttcgccgtgccgtccagtttcgttagcgtgatgccggttaagccaacggcttcatggaacagtttggcctggcttaccgcgttctgcccggtgctggcatcgatagtcagcataacttcatgcggcgcttcaacgtcgagtttcttcatcacgcggacgattttcttcaactcttccatcaggtgcgatttgttctgcaggcgtccggcggtatcggcaatcaggacgtcgatattacgcgctttagccgcctgaatggcgtcgaagataacagaggcggaa

SEQ ID NO: 1536 - DNA, 12926 bp, Escherichia coli
  Strain O55:H7
  modified_base (3938)..(3938): a, c, g or t
  modified_base (3947)..(3947): a, c, g or t
  modified_base (9831)..(9831): a, c, g or t
  modified_base (9833)..(9834): a, c, g or t
  modified_base (9837)..(9838): a, c, g or t
  modified_base (12764)..(12767): a, c, g or t
cggtatgctgggcaatcaccggaatattgttgcgctgcccccagacctgaagctgttcaaccgctgctgcacggaaagtatcgcccgccgccagcatcaccgatttaccctgctgctcaaactgacgtgccagcttaccaatcgtcgtggttttacccacaccgttgacgcccaccatcaggatcacgaacggcgttttaccttcaacattcagcggctcatcgactttcgccagaatctcacccatctcttctttcagcaggccatagagcgcctcggcatcacgaagctgcttgcgggatgcgccttccgtcagattggtgataattttacgtgtggtttccacgcccacatcggcgatcaaaagctgctcttccagctcctcaaacagatcatcgtcgatttttttaccgcggaacaggctgataaatccggaaccgagattttctttggtttttaacaggctgcgtttcaggcgcgcgaaaaaaccttctttggtcggtttttcctgctcctgagcgatttcttccaccggctgctcttcttctgccggaggaaccaccatcaccgcctcttctgctgcttcggcagccagcgcctgtgcttccagctcttcgtcggtgatttcttctttagccgcttcttcttccgccgcttcgacaatctctacggtttccgcttcagcctgccactcttctggcgaaacctcttcggcgttgacgtcttccggcaacggcagctcttcacgttcgatagccactggctccggcgtttcttctacgaccggttccggttgtgcaacgacttccgcttcaggctgcgctttttcattttcagcaacctgttcagtgacttccacaacgtcggcagcaaaagtttccgcctcggcctcagtatgcgcctgcggctgctcttcgacggcttgttcagaagccttcacaggctcttgcgcctgaacgatttcttctacaaccgtttgttcattctgaacttctgtctctttttccggggtctgctctttttgaccaaagcccagccaggaaaaaaagccacgttttttttctttcgccatttgcgactacactcctcgctgttgcttcatggcacagcgttaacgctatgtacatagcagctaaaaaaatgatgaaatagtctatcacttaacttaattcacatcaccgcctgcaagtatgtgttatctggcggattgagcaatttatcatgaaaaaaccgaatcattccggcagcggccaaatccgcattattggcgggcagtggcgaggccgtaaactcccggttcctgatagcccaggtctgcgccccaccaccgaccgcgtacgcgaaacgttgtttaactggctggctccggtcattgttgacgcccaatgtctggattgcttcgccgggagcggcgcgctggggctggaagcgttatcgcgctacgctgcgggggccacgttaattgagatggatcgtgcagtttctcagcagttaattaagaatctggcgacactaaaagcaggcaatgcacgcgtggtgaacagcaacgcaatgtcattcctggcgcaaaaaggcacaccgcataatatcgtgtttgtcgatccaccgttccgccgtggtttgttagaagagacgataaatttactggaagataacggctggctggctgacgaaaccctgatttatgtcgaaagcgaagtcgaaaacggtctgcccaccgttccggcaaactggtcgttacatcgggaaaaagtggcgggtcaggtggcttatcggctgtatcaacgcgaagcacaaggagaaagtgatgctgattaatattggtcgtttgttaatgctctgtgtttggggatttttaatcctcaacctggtgcatcccttcccgcgcccgctgaatattttcgttaacgtggcgctgatttttaccgtgctgatgcatggtatgcaactggcgctattgaaatccactttaccgaaagatggcccgcagatgaccaccgccgaaaaggtgcggattttccttttcggcgtgtttgaactgctggtctggcagaagaaatttaaagttaaaaaataaccttattgttcgccaacaaagctaacaaagcgcgttcctttatagctcagcgtacctttatcgcccactgtcagggcgtggtactgctgggcgtcgaggcgaaacgtctgctccattcctccgctttgcggtttgaagcttgcctcatagcgcatactggtgcctgccggagtcacttcctgctggcgcgaacggcgatcgttaatcggtttttcccgcttgttgctcaccaacaccagcttttgctggagtggtgccatatcattatcagctttttcccgtcgctgttgcataaaacgaaacgatgcggcgacgatgattaagccaatgataacaataaagaaaagaggtggtttgctcatctttatccctcatcggaaaatgcggaaataagcataccctgccagttatggtgttgtcatccgtccaccctcgccactaaactggaagcaagaccgtaggcattccgcttacgaaaaaataacgaattcaaggaactaagatgctttggtcgtttatcgctgcctgtctttccgcatggctatctgtggatgcatcgtatcgtgggccaacctggcaacgctgggtgtttaaaccgttaacccttcttctcctgctgttactggcctggcaagcgccgatgttcgacgccattagctatctggtgctggcagggctgtgcgcctcactgctgggcgatgcgctaaccctgttgccacgtcaacgtctgatgtacgccatcggcgcgtttttcctctcgcacctgctgtacaccatctatttcgccagtcagatgacgctctctttcttctggcctctgccactggtgttgctggttctgggtgcgctgttactggcgattatctggacgcggctggaagagtatcgttggcctatctgcacgtttatcggcatgacgctggtgatggtgtggctggcaggtgaactgtggttcttccgtccgaccgctccggcactctctgcgtttgtcggcgcttcgttgctgtttatcagtaactttgtctggctgggtagtcactatcgccgacgcttccgtgcggacaacgcgattgctgcggcctgctactttgccggtcacttcctcatcgtccgctcgctgtatctctgataaaacttgactctggagtcgactccagagtgtatccttcggttaatgagaaaaaacttaaccggaggatgccatgtcgactcctgacaatcacggcaagaaagcccctcaatttgctgcgttcaaaccgctaaccacggtacagaacgccaacgactgttgctgcgacggcgcatgttccagcacgccaactctctctgaaaacgtctccggcacccgctatagctggaaagtcagcggcatggactgcgccgcctgtgcgcgcaaggtagaaaatgccgtgcgccagcttgcaggcgtgaatcaggtacaggtgttgttcgccaccgaaaaactggtggttgatgccgacaatgacatccgtgcacaagttgaatctgcggtgcaaaaagcgggctattccctgcgcgatgagcaggccgtcgacgagccacaagcatcgcgcctgaaagagaatctgccgctgattacgcttatcgtgatgatggcaatcagctggggtttggagcaatttaatcatccgttcgggcaactggcgtttatcgcgaccacgctggttgggctgtacccgattgctcgtcaggcattacggctgatcaaatccggctgctacttcgccattgaaaccttaatgagcgtagccgctattggtgcactgtttattggcgcaacggctgaagctgcgatggtgttgctgctgtttttgattggtgaacgactggaaggctgggncgccagccncgcgcgtcaaggggtcagcgcgttaatggcgctgaaaccagaaaccgccacgcgcctgcgtaacggtgagcgggaagaggtggcgattaacagcctgcgccctggcgatgtgattgaagtcgccgcaggtggacgtttgcctgccgacggtaaactgctctcaccgtttgccagttttgatgaaagctccctgaccggcgaatctattccggtggagcgcgcaacgggcgataaagttcctgcaggagccaccagcgtagaccgtctggtaacgctggaagtgctgtcagaaccgggtgccagcgccattgaccggattctgaaactgatcgaagaagccgaagagcgtcgcgcacccattgagcggtttatcgaccgtttcagccgtatttacacgcccgcgattatggccgtcgctctgctggtgacgctggtgccaccgctgctgtttgccaccagctggcaggagtggatttataaagggctgacgctgctgctgattggctgcccgtgtgcgttagttatctcaacgcctgcggcgattacctccgggctggcggcggcagcgcgtcgtggggcgttgattaaaggtggagcggcgctggaacagctgggtcgtgttacccaggtggcgtttgataaaaccggtacgctgaccgtcggtaaaccgcgcgttaccgcgattcatccggcaacgggtattagtgaatctgaactgctgacactggcggcggcggtcgagcaaggcgcgacgcatccactggcgcaggccatcgtgcgcgaagcacaggttgctgcactcgccattcccgccgccgaatcacagcgggcgctggtcgggtctggcattgaagcgcaggttaacggtgagcgcgtgttgatatgcgctgccgggaaacatcccgctgatgcatttgctggtttgattaatgaactggaaagcgccgggcaaacggttgtgctggtagtacgtaatgatgacgtgctgggtatcattgcattgcaggataccctgcgcgccgatgctgcaactgccatcagtgaactgaacgcgctgggcgtcaaaggggtgatcctcaccggcgataatccacgcgcagcggcggcaattgccggggagctggggctggagtttaaagcgggcctgttgccggaagataaagtcaaagcggtgaccgagctgaatcaacatgcgccgctggcgatggtcggtgacggtattaacgacgcgccagcgatgaaagctgccgccatcgggattgcaatgggcagcggcacagacgtggcgctggaaaccgccgacgcagcattaacccataaccacctgcgcggtctggtgcaaatgattgaactggcacgcgccactcacgccaatatccgccagaacatcactattgcgctggggctgaaagggatcttcctcgtcaccacgctgttagggatgaccggactatggctggcagtgctggcagatacgggtgcgacggtgctggtgacagcgaatgcgttaagattgttgcgcaggagataaggcaaaccgatcgcaacattgagcgcgatcggtcccctcgctcctctggggagagggttagggtgaggggaaaaggcggcatcgaagccaatctgcccccgtcaaccgcctttacgaatcaaataacgataaggcagtccatccgtctctttggcaaccagttcgtgttccataaaggtacaaaacccagggatatcgcgggtcgtcgccggatcgtcagcaataatcagcaatgtttcacctggctgcatattgcgcactgttttgcgcaccatcatgactggttccgggcagcgcaggccaagtgcgtcgagtgtgtggtcagggctggaaaagagatcggtcattttcttctcatcacataaaaaaacggcgctagtttacgccctgtgagtccgtaagcaaaccaggttaacgattgcgtgaaaattaaccattgcattgtcaacgtaaagcagtatcatgcggcggctcgaaaaaagggtaagcacgttattatgttaaggtaacagacgtgtcgtacgtattgggttccctcaccccaatggttaatcaaaaaggtacaatatgaacgttttctcgcaaactcaacgctataaggcgttgttctggttatcgttatttcatctgctggtgatcacctccagtaactatctggttcagcttcccgtctccatttttggtttccataccacctggggcgcgtttagctttccgtttatctttctcgctaccgacctgaccgtacgtatttttggcgcaccgctggcccgtcgtatcatctttgcggtgatgatcccggcattgctgatctcctacgtcatctcgtcgctattctatatgggttcatggcagggattcggcgcactcgcccacttcaacctgtttgtcgcccgtatcgccaccgccagtttcatggcctacgcgctgggacagatcctcgacgtgcacgtttttaaccgcctgcgtcagagtcgccgctggtggctggcaccgacagcgtccacactgttcggtaacgtcagcgacacgctggcctttttcttcattgccttctggcgtagcccggatgcctttatggctgaacactggatggaaatcgcgctggtcgattactgtttcaaagtgttaatcagtatcgttttcttcctgccaatgtatggcgtattactcaatatgctgttgaaaagactggcagataaatccgaaatcaacgctttgcaggcgagttaaaggttcgttatcagagttgtgataagatggatgaatgagccgttatggccgtttatcgaaaggaagaagtcaatgcgcaatctggttaaatatgtcggaattggcctgctggttatggggcttgcggcctgtgatgataaagacactaacgctacggcgcagggttcggtcgcggaaagtaacgctaccgggaatcccgtcaacctgcttgatggcaagttaagtttctcgctgccagcggatatgaccgaccagagcggtaagctgggaacgcaggccaataacatgcatgtctggtccgacgccaccgggcagaaagcagtcatcgtcatcatgggcgatgatccgaaagaagatctggcggtgctggcgaagcgtctggaagatcagcaacgtagccgcgatccacagctgcaagtggtaaccaataaagccattgagctgaaaggtcacaaaatgcagcagttagacagtattatctccgcgaaaggccagacggcgtactcttccgttattctgggtaacgtgggtaatcaactgctgaccatgcaaattactctgccagctgacgatcagcaaaaagcgcagaccaccgcagaaaacatcattaatacgctggttattcagtaagttttaagatgatgaggcggcctcagggacgtgttccggaggccgtttttttaatcgccacgtcagtaataacgcgattgcgaccagtcccgccgccgccagataaatcaccggtacgcccgcccaactcatcaccagcccagccagtggtccggtcacgccaagcgataaatccataaatacggtgtaggttgccagcgccgccccctgattttgctgcggaaccgcttttaccgccactacacccaatgccgggaacaccagcgaaaacccggcccccgccagtaagacgccgattttcgccatccacggcatagtcgccacgccaaccagtagcaggccgattatctcaacgctaaagcaaatcatcgctacgtttaagccgccgatacggttaatgccgttagggaataacaaacgcgtaccgacaaacgcacagctaaacagcgtcagcgcgaaagccgcaccgtcccaacctttaacgtcataaaacagcgtgataaaggtggcgatgacgccaaatccggcggaagccagtgccagcgccataccgtacagccagacgcgcccaagcaccgcgcgaaacggcagcggtttgcctttactggcttttaccgtcggacgcgggatcgccaacaaaatggccaccagcgccacgcccataataattaacgctaacgcctgcaagccgccccagtgataaaacacgacgcctaacggcgcacccatcgccatcgccccgtaagtgacaatgccgttccacgaaatcacccgcccgatatgcagcgagccaaccacgccaacaccccacagggtcgatcccgttccggcaaaactttgcccaatcccaaggatgacgcgtcccaggcaaagtaataacaggctgatgacgggcagactggcggttaatcctgccgtcagatatcccagaccgctcaaaaagcagccgcataaaccgaagacgacaatctttttggggcccagcaaatcggcgtaacgtccggcatgaggacggctcagcaaggtggcgaaatattgcaggctgataaccaatcctgcccagaaagcgctaaagcccatcacatcatggacatagcccggtaatacagcgagcggcaacccgatggtgaggtagctggcgaagttaaacatgacaatggagacaatgcgcaaattcaggcgcaatccgtttagcgcgggttcggctacgggttcgggcatgaggatcaccacatttttacaacagtgtttcatttttaccacgtgctgacgtgaaaatcagcagtaagaatcagaatattgccgtcgtgactcccgctacacttaatacaaaaagtcacaaggaagccccaatggaaacccctcaacccgataaaacgggcatgcacattctgctcaagctggcctcgctggtagtgatcctcgcgggcattcacgcagcggcagatatcattgtgcagctgttactggcgctgttttttgccatcgtcctcaacccgctcgtcacctggtttattcgtcggggagtacaacgccccgttgccattacgattgtagtggtggtgatgctgatcgcactaaccgcgctggtcggcgtactggcggcatcgtttaacgaatttatctctatgctgccgaagtttaataaggagctgacgcgcaaactttttaaattgcaggagatgttgccttttcttaatttgcatatgtcgccggagcgaatgctgcagcggatggactcggaaaaagtggttaccttcaccacagcgctaatgaccgggctttccggggcaatggcgagcgtgcttttgctggtgatgaccgtagtttttatgctgtttgaagtgcgccacgtcccttacaaaatgcgttttgcgctgaataacccacagattcacatcgcgggattacaccgcgcacttaaaggcgtttcgcattatctggcgttaaagacgctactcagtttatggacgggtgtcatcgtctggctggggctggagctgatgggggtacagtttgcgctgatgtgggcagtactggcgtttttgcttaactacgtgcccaatatcggcgcggtaatttccgccgtaccgccaatgattcaggtgctgctgtttaatggtgtttacgaatgtattctggtcggcgcattgtttttagtggtccatatggtcatcggcaatattttagaaccacggatgatgggccatcgcctggggatgtccaccatggtggtatttctttcattgttaatttggggatggctgctcggcccggtagggatgctactttcggtgccattaaccagcgtgtgtaaaatctggatggaaacgacgaaaggcggcagcaaactggcgattttactggggccgggcagaccgaaaagtcggttaccgggttaatagcacctcctgagcaggcaatggccaccgtttatctaacagtggccatttgatttgaggaaatgatgaaacattattcagaaaattnanntannaaaaccattccttaagtcaaatatatataaacgccgaatagcgattaaatccttctcaaagaatgcactgataacattgtgttatttttattgcctcatttttctcactcacttatagttggtccctgctggcagtaatttagtcatttcagagatttttactctgatgtgcacttactgacttatctcacaagtaattttttctctaaataaagaatagtgatgccagcaattacagttaaaacttgctttactcgtaaaaacaatactttaatggggttctaatgagacattacatgaaatggtttgcggctattgctgttgtgggtgctttagcaggttgcgcgcgtactgcgccaattgatcaggttcactcaaccgtcagcgctggtcatacccaggaacaagtgaaaaaagcgattctgaaagctggcgttgaacgcaaatggattatgtccgaagccggacaaggcataattaaagcacgtcaacagtcacgcgatcattcagcggaaatacgcattaactacacggcatccagctacgatatcaattatgaaaatagccagaacctacaagcgtcaggcggacaaattcataaaaactacaatcgctgggtccgcaatctcgacaaagatattcaactgaatttgtcagcgggmgcagatttataattcttcctaaagtcgggccgttgcggtccgataataatttaattccctcttaacaggttgtgcccaacatgtacgaacaggattctcttagcgcactggatgcgattaccgaagctcaacgcattgcctttgcccctatgctttttcaaacagcactctgcctacgtaatgcgggtgtactttcatatctggatcggcaaggcaaacatggcgcaacgctggctgatatcaccgaacatagccatatcaacgaatatgctaccagcgttctgttagatatgggcttaagcgggcgaattattacctgtaaagagggaatttattacctggcgaaaatcggtcattacctcctgcatgacactatgactcgcgtgaatatggatttcacccaggatgtctgttaccaggggctcttcttcctcgccgattcactcaatgaaggaaaaccttccgggttaaaagtatttggcgactggtcgacgatatatccggcactttcgcaattaccagacgccgctcgtgaaagctggtttgcgtttgatcattactattcagatggcgcatttaacgccgcactgccttatgtattcgccaacaaccccacaacattgtacgatgtaggcggcaatacgggtaagtgggctttgcgttgctgcaaatacaatgaaaacatcgccgttacgttattagatctgccacaacaaatcgtactagcgaaagaaaatatcgcgaatgcaggtttttctgatcgcatagatttccatgcggtggatatgctaagcgatgccccattaccgggcgaggctgatatctggtggatgagccaatttttagactgtttttcacccgaacaaataattagcatactcagcaaaattgccagcgtaatgaagcctggcgcaaaagtttgcatcatggagttgttctgggatgcgcagcggtttgaagcagcatcgtttagcctgaacgcgtcctcactttattttacctgcatggcaaacggtaacagccgtttctatagtgcagagaaattttacgactatctgaataaagcaggattccaggtagcagagcgccacgataatttaggcgttgggcatacacttttgatatgccaaaagaaataatcgtcacttaataattttggtttaccgcgggcgcgcgttgatgaaatttgcattaaacattctcgactggcaggcaagagcgcctggacttagtgaaacgctgcaatggcaggagtggtcacgtcagcctcaggcaattgacccgacagcaccgttggcaaaattaagtgaactgccaatgatgaccgcccgccgcctcagctccgggagcaaactggctgttgaatgcggtctggcaatgctacgccgccatcaaccagacgccgttttgtataccagtcgtcatggcgaactggagcgcaattaccgcattgttcatgcactggcaaccgaacaggcgctttctccgacggacttcgcgctctccgtacacaactcttccgtgggtaacctgaccattgcggccaaacagccgatcgtttcgtcatcgctttcggctggtcgcgatagtttccagcaaggtttgtgtgaagtgcttagcctgctacaagcgggataccagcgcgtgctgatggtcgattttgacggtttcctgcccgagttttatcacccacaactgccatcagaaatgccgacctggccgtacgccgtcgcgctggtgattgaagctggcgatgactggcaatgtgaaacgcagtcagccattgcgggcaatgaaacaacactgccgcaaagcatgttgtttttacagcactatttacaaaatgtagacacattttcactgcctggcgagcgcgtgcaatggcgctggagccacagatgagtaagctgatgtcacgtctggagtggacctggcgactggtcatgaccgggttatgttttgccctgtttggtctcggcggcctgctgctttctgtcgtgtggtttaacatattgttagttttggtgtgggatacttcccgccgccgtcgtttggcgcgtcgcagcattgccgccagttttcgcctgtttttaactgtcgcgaaagggcttggcgtactggattatcgtattgatggcgctgaaatcttacatcaggaacgcggttgcctcgtcgtagccaatcatcccacgctgatcgattacgtgctgctggcgtcagtcatgccagaaactgactgcctggtgaaaagcgcgctgttaaannnnccttttcttggcggcgtcgtgcgggcgacagattatttaatcaacagcgaagctgaaactctgttaccccgctgccaacagcgactggcacagggtgacactatcctgattttccccgaaggcacacgaacgaagcccggtgaaaaaatgacgctgcag

SEQ ID NO: 1537 - DNA, 20069 bp, Escherichia coli
  Strain O55:H7
  modified_base (545)..(545): a, c, g or t
  modified_base (2583)..(2583): a, c, g or t
  modified_base (3407)..(3407): a, c, g or t
  modified_base (6889)..(6889): a, c, g or t
  modified_base (7659)..(7659): a, c, g or t
  modified_base (8728)..(8729): a, c, g or t
  modified_base (12116)..(12116): a, c, g or t
  modified_base (13737)..(13737): a, c, g or t
  modified_base (14180)..(14180): a, c, g or t
  modified_base (15267)..(15270): a, c, g or t
  modified_base (15619)..(15619): a, c, g or t
  modified_base (20065)..(20068): a, c, g or t
cgaatattgccgtgcgctgcgccagcgatttacgcatcgtgacaatcggctgtagcgagcatctgctggataaacaaagtaaatggtatgacgttccacctgaccggccgttttttacggttgcagtccatggtcgggttgaaatcaataaattttacgatgcaacttcacaagaaccggcgctggcagcaaggcagttaaaccggcatcttttgcttcaattacaacaaggttgtttacctctctcaggaataaataatgcaagcgctttatctggaaattaaaaacctcatcatcagcaccctcaatctggacgagttgacgcctgatgatatcgataccgacgcgccgctgtttggcgacggtttagggctggactctatcgatgccctggaactgggactggcagtaaaaaatgagtacggcatcgtgctctctgcggaaagcgaagagatgcgtcagcactttttctccgtcgccactctggcctctttcattgctgcgcaacgtgcctgaggaaagccatcatgacagaacaacaaacngtctatcaggaagtctcagccctgctggttaagctgtttgaaatcgatccgcaggacatcaaacctgaagcgcgcctgtacgaagatctggaactggacagcatcgacgccgttgacatgattgtgcacctgcaaaagaaaaccggtaagaaaatcaagccggaagagtttaaagcagtgcgtacagtccaggatgtcgtcgaggctgtagaacgcctgctacaagaagcctgatctgatgtcgggcattcgctcgctaccgatgattaagctgctgactggattattgctgctcgcctggccgtttgtgatttggtttggcttagcgcataacggcctgcactggctgttaccgctaatggcgttgctgcttttgttgcgtctgcgccagacccgtcgccaggcggggcctttacaagccgtcacgcaactcgtcgctgtcgtgggcatcgcattatgtgtcgccagctttatgttgaaaacgcaccagctactgctgttttacccggtagtggttaacgcggtcatgctggcggtttttggcggttcgctgtggtcggcaatgccgatagttgagcggctggcgcggttgcaggagccagacctcccggaaaagggcgtgcgctatacccgccacgtcacgcaaatctggtgcggctttttcatcattaacggtggaattgccctctttaccgcgctttatgccgatatgtcgttatggaccgcctggaacggcatgattgcttatttgttgatggggacgttaatggctggtgaatggctgctgcgccgtcaggtgatgaaaagagatcgcgcatgaagcagaccttaccgcttgcacgctggctgactgcgccacgccctgatgacacacccattgcgtggctgaacgaaagtacctggacgctgggcgatttgcgtcacgatgtcgcgcaacttatctgccgcttgcagcaacagccgggtgaacgctgggcgctgtgctttgagaacagctatctgtttatcgttgccctgctcgccacgctacacgccggaaaaacgccggtgcttccggggcataaccgtgttatccagcttaacgagcaacgtgaactttttgatggtgtgcttagcgacagcgaacttaactggcaaggttcattgctgttggtagcaagttctccacaaatcgcgacacaatccttcacctttgccgctatagcgccagaggcttttatcgagctgtttacctccggttccacgggacagccgaaacgggcgattaaacctgttcatttgctggatcgtgaagcagaactgctggctgaacgattaggcgcacgtctggcgggttgtcgtgtcgtcggttccgtattgccgcagcatttgtacggcctgacttttcgcgttttcctgcccatggcgttgggattaccgctgcacgccgccatgctctggtatgtcgaacagtttgccgcgttgagtcatcagcatcgctatatcttcatcagcagcccggcatttttgaagcgcctggatacccagctttctccgccacccgttcaggtgcttctctctgctggcggtgagctgccgtggcaggatgtacaacataccgcgagctggctgcgcgtctggcctgatgaaatctacggcagcacggaaactggcgtcatcgcctggcgctaccgcgaacaagagcaacgccgctggctacccctcccaggtatgcagttccaggccgaaggcgatgcctttcgcctcttttcaccgctgatagcggaagataacggcatgttactcgacgatatcttacagtttagcgaagatggtcagttccatctgatggggcgtcgtgggcgcatcgttaagattgaagaaaaacgtatttcactccaggaagtagaacaacgtctactggcgctggacggcattcgcgaggcggcggcagttcccgttacgcgcggcgggcgtcagagcataggcgttttgctggtgctggatgacgaagctcatctgcaatggcagaacggcggcgggcatagccaggaaatgncctggcggcgtttactgcgcccgacgctggagccagttgctattccgcgttactggcgcgttattgatgaaatgccagtaaacagtatgaacaagcgtgtctatgcgcaattacaggagttatttcatgaagccccatgaaatcgagcgccatcaggcacaaacgaatcaccttgaaattgttctgcatctcagggcggatctgttctggtttcgcggtcattttgccgtgcaaccattactcccaggagttgcgcaaatcgactgggcgatgagctacgcgctcaatctgctcgcgcctggctggcgttttcactccattcagaacataaaattccagtctccgttgctgccggaaaaccgcgtcacgctcgcgcttaactggcaggaagaacgccagattctgagctttagctatcagcgtcacgacggtgacgcccgccacaccgccagtagcgggaagatccgcctatgtcggtaaacttttctccctgcgtgttgataccctgctacaaccacggcgcgatgatgccgggcgtgctggcgcgtcttaagccatttaatctgccctgtattgtggtggatgacggcagcgatgccaccacacaacagcaactggacagtctgcttgccgaacagcctggcgtgaccttaattcgcctggcagaaaacgcaggcaaaggcgcggcggtgatgcgtggcttacaggcagcggcagacgcagggttcagccatgcggtgcaggtggatgctgacggtcagcacgcgattgaagatatccctaaactgctggctctcgctgaacaacaacctgcggcactgatntccggccagccaatttacgatgactccatcccccgctcacggctttacgggcgctgggtcacccacgtctgggtatggatcgaaacgctctccctgcaactgaaagacagcatgtgcggttttcgcgtttatccggttgcgccaacgctgcaactggcaaaacacgccaccatcggcaagcggatggatttcgacaccgaagtgatggtgcgcctctactggcagggaaataccagctatttcgtgccgacccgcgtcacctatccactggacgggctttcgcattttgatgccctgaaagataacgtccgcatctcgctcatgcacacgcgtctgtttttcggcatgttgccgcgtattccttcactgctgatgcgccgctcttcctgccactgggcgcggcagagtgaagtgaaaggattatggggaatgcgcctgatgctgctggtctggcgtctgctgggaagaacggcgtttagcgcgctgctttacccggtggtgggcgtctactggctcactgcttctcgtgcgcgcaaagcgtcgcaagactggctcgcccgtgtacgacagcatcaaccacaggcggcaaaactcaacagctatcagcactttctacgtttcggtaatgccatgctcgacaaaatcgccagctggcgcggcgagctacaactagggcgtgatgtgctgtttgcgccaggcgcagaagcagcgcttgacgtccgcgatccgcgcggcaaattgctgctggcctcgcatcttggcgatgtggaagtgtgccgggcgctggcaaaaattcagggctacaaaaccattaacgcgctggtgtttagcgaaaacgcccaacgctttaaacagataatgcaggagatggctcctcaggcaggcattaacctgatgccggtaacagatatcggcccagaaaccgccatcctgctgaaagagaagctggataacggcgaatgggtggcgattgtcggtgaccgcatcgccgtcaacccgcaacgcggcggcgactggcgcgtctgctggagttcgtttatgggccagcctgcgcctttcccacaggggccgtttattctcgcctctattttgcgctgcccggtgaatctgattttcgccctgcgccagcacggcaagctgcatattcactgcgaaagctttgccgacccactgcagctgccgcgcggcgaacgccaacaggcgctgcaaaacgctatcgatcattacgccgcgcgtctggaacattacgcgctccagtcgcctctcgactggtttaattttttcgatttctggcaactgccggaaattcaggacaaggagtaaagggtgctgaacgatccccgatttaccgcagaagtcgagctgaccattccctttcacgacgtcgatatgatgggcgtggcctggcacggtaactattttcgctactttgaagtggctcgcgaggcgctgctcaaccagttcaattacggctatcggcaaatgaaagagtccggttatttgtggccagtggtcgatgcgcgggtgaaatatcgccacgccctcacctttgagcaacgcatccgcgtgcgtgcgcatatcgaagagttcgaaaaccgtctgcggattggctatcagattttcgatgccgaaacgggcaaacgcgccaccaccggatacaccattcaggtcgcggtcgacgagcaaagtcgcgaactgtgctttgtcagccccgatattctgtttgaacgcatgggagtcaaaccatgaaatttttaccgctgctggcgctgctgattagcccgtttgtgagcgccctgaccctggacgatcttcagcaacgctttaccgaacaaccggtgatccgcgcccatttcgatcaaacccggacgattaaagatctgccgcagccgctgcgatctcagggccagatgttgatcgcccgcgaccaggggctgttgtgggatcaaacctcaccgttccccatgcaactattactggacgataaacgcatggtgcaggtgatcaacggtcagccgccgcaaatcatcacggcagaaaacaacccgcagatgttccagtttaaccacctgctgcgcgcgttgttccaggccgatcgcaaagtgctggaacaaaacttccgcgtcgaatttgctgacaaaggcgaaggccgctggacgctgcgcctgacgccgaccaccacgccgctggataaaattttcaacaccatcgatctcgccgggaaaacctatctggagagcattcaacttaatgataaacagggcgatcgcaccgatattgctcttacccaacatcaactgacgccagcgcaactgaccgatgacgaacgccaacgttttgccgcccagtaaacgccccgcgctgttatgggggctagtctgcctggtcatggcggtggcgttgctgatcctgctgccgcaatcacggctgaacagtagcgtgctggctatgttacccaaacagacgatgggcgatattcctccggcgctgaatgacggctttatgcagcgtcttgaccgccaactggtgtggctggtcagccccggtaaagaggctaatcctttggtcgctcaggagtggctgacgctgctgcaaaaatccgctgcgctcggcgacgttaaagggccaatggatgccgccagccagcaggcgtggggagcgtttttctggcagcatcgcaacggcctgattgaccccaacacccgcgcccgcctgcaaaacggcggcgaagcgcaggcacagtggatcctctcccagctttattccgcattctccggcgtaagcggcaaggagctgcaaaacgatccgctgatgttaatgcgcggctcgcagctggcaatggcgaaaaacggccagcgtttgcggctgatggacggttggctggtgacgcaggatccccagggcaactactggtatctgctgcacggcgaactggcgggatcgtcgtttgatatgcagcaaacccaccagctgatcacgaccctgaatacgctggaaaaggatctgaaaacgcgttacccgcaggcacagttgctctcgcgcggcacggtgttttacagcgattacgccagccaacaggcgaagcaggatatctccaccctgggcgtggctacgctgctgggggtgatattgctgattgtggcggtgttccgctctttacgcccgttgctgctttgcgtgatttccatcggcatcggcgcgctggcgggaacggtcgccactttattgattttcggtgaattacacctgatgacgctggtgatgagcatgagcgttatcggcatttccgctgactacacgctctattatctcaccgagcggatggttcacggcaacgacgtttcgccgtggcaaagcctggcgaaagtacgcaatgccttgctactggcgctgctcaccaccgtggcggcgtatctgattatgatgctcgcccccttccccggcattcgccagatggcgatttttgccgccgtcgggttgancgcctcctgtctgaccgtcctgttctggcatccgtggctgtgccgtggcctgccggtgcgtccggttccggcgatggcgctgatgctacgctggctggcagcgtggcggcgtaataaaaaactgtcgctgggtctgcccgtcgcgctggcgctgttttcgctggcggggatgtcaatgctacgcgtcgatgacgatatctcgcagttacaggcgctaccgcagcatattctggcgcaggaaaaagccattaccgccctgaccgggcagagcgtcgatcaaaaatggtttgtggtttacggcgattcgccacagcaaacattgcggcgactggagaaatataccgcctcacttgagtatgcgaaaaaagaggggcttatcagcaactaccgcaccattccgctgaactcccttgcgcggcaggaggaagatttacaactgctgaaaacggcggccccgacagtaacaaaagcgctgcaaaatgccgggctgacggcagtgaacccggatctcaacgccatgccagtgaacgttgatgaatggctggcaagccccgccagtgaaggctggcgtctgctgtggctgacgctggaaaacggcgaaagcggcgtactggtgccggttgaaggggttaaaagtagcgcgttgatgcaggaaatcgccacatattacccttgcggcattgcctgggttgatcgcaaaagcacctttgatgaattgttcgcactttaccgctacgtcttaaccggcttgttgctggtggcgctggcantgattgcctgcggcgcagtggcccgtctcggctggcgcaaagggcttatcagcctggtgccttcggtgctttcgctgggctgtggtctggcggtgctggcgatgagcgggcaggcggtgaatctcttttcgctgctggcgctggtgctggtgcttggcatcggtatcaactacacgctgtttttcagtaatccgcgcggtacaccgttaacttcgctactggcgatcgcgctggcaatgctcaccaccttgctgacgctgggtatgctggtattcagcgccacccaggccatcagcagttttggcattgtgctggtgagcggtattttcaccgccttcctgctttcgccgctggctatgcccgataaaaagagaacaaaaaaatgatcaaatccacattctggcgagcgttcgccctgaccgctacgcttatcctcaccggctgtagccactcgcaaccagaacaggaaggccgcccgcaggcgtggctgcaacctggcacgcgcatcacgctgccggcaccagggatttcacccgcagtcaattcgcagcaactgttgaccggcagcttcaacggcaaaacccagtcgctgttagtgatgcttaacgccgacgatcagaaaatcacccttgccgggctgtcgtcggtcggcattcgcctgtttctggtgacctacgatgcgcaagggctacgcgccgagcaatccatcgtcgtcccacagttaccgcccgcaagtcaggtactggctgacgtgatgctcagccactggccgattagcgcctggcaaccgcaacttcccgcaggatggacacttcgcgacaacggtgacaaacgcgagctgcgtaacgccagcggcaaactggtcacggaaatcacctatctgaatcgcaagggcaaacgcgtgccaatcagcattgagcagcatgtctttaaataccacatcaccattcaatacttaggtgactgatatgatttatatttccgccgtcggcatgatcaacgccctgggaaataaccttgacgaaatcgcaaccaacctgactcgcggtgttgctcccggcatgcgccnncgcgcaggctggttgcaggggcatccgcaggcggtcctggctggcgtggatggcgagcttccgcttatcccggaaaaattcgctgcgcaccgctcgcgcaacaatcagatcctgctggcggcgctggcgcagatccagccgcaggttgatgacgccattgcgaaatatggccgcgagcgcattgcgattgtgcttggtaccagcacctccggcctgcatgaaggcgacacgcacgttaacctgcgcacccacgggcagccgagcaccacatggcactacgcgcaacaggaactcggcgatccgtcgcgttttctcagccactggctggcgctcgacggcccggcctataccctttcaaccgcctgctcttccagcgccagagcgataatcagcgggcgcaggcttatcgaagcggggctggtcgatgccgccattgtgggtggcgcagacaccctgagccggatgccgattaacggttttcacagcctcgaatcgctgtcgccaaccttatgtcagccgtttggtcgtgaccgcgcaggtatcaccattggtgaaggggcggggctaatgctgctgacccgggaaccgcagcccatcgcgttgctgggcgttggtgaatcgagcgacgcttaccatatttcagccccgcatccgcagggcgaaggagcgatccgcgctattaatcaggcgctgaccgatgcgcagcttacgccagatgacgtcggctatatcaacctgcacggcaccgccacacaactcaacgatcagattgaatcaatggtggttaacgccctgtttggcgaacgcgtaccgtgcagctccaccaaacatttgaccggacacacgctgggcgcagcgggcattaccgaggcggcaattagtatgttgattttacagcgtgatttaccgctgcccgctcaggacttcagcctgtcgccgcgcgatcccacgctgccaccgtgtggcattatcgaaaaaccgcagccgctggcacgtccggtgatcctgtccaattccttcgcctttggcggcaataacgccagcattctgctcgggagggtttcgtgagccactatttatcccccggcgcttatctgccccacgacgcgcccatgttactgctggaagacgtggtgagcgtcagcgatgacagcgcggtgtgccgcgtgacggtttcgcccagtggcgtactggcaccgtttctcgacccggacggcaatctccccggctggtttacccttgaactgatggcgcaaaccgtcggcgtctggtctggctggcatcgccaccagcagggcaaaaacagtattgagttagggatgatactgggcgcgcgtgaattgctttgcaccactggcattctgcccgcaggccagacgctgaccattaccgtcaaactgctgatgcaagacgatcgcttcggcagttttgagtgcagcatcaacgacggcgaggcgacgggccgcattaacaccttccagccgaccgcggaagaacttaccaccctgtttcaacaaggagcgtcctgatgagtcgttcagttctggttactggtgccagcaaaggcattggtcgcgccatcgcctgccaactggcggcagacggctttaacattggcgttcactatcaccgtgacgccacaggcgctcaggaaacgctgaatgccattgtcgccaatgggggtaacgggcgtttgctcagtttcgacgtcgcaaaccgcgaacagtgtcgggaagtgctggagcacgaaatcgcgcaacacggtgcctggtacggcgtggtcagtaacgccgggatcgcccgcgatgccgcttttccggctttaagcgatgacgactgggatgcggtgatccacaccaacctcgacagtttctacaacgtcattcagccgtgcattatgccgatgatcggcgcacgccagggtgggcgcatcatcacgctatcctcggtttccggcgtaatgggcaatcgcggccaggtgaattacagcgctgccaaagccggaattatcggcgcaacaaaagcgctggctatcgaactcgcgaagcgcaaaatcaccgtcaactgcatcgcgccggggcttattgataccgggatgatcgaaatggaagagagcgccctgaaagaggcaatgtcgatgatccccatgaaacgcatgggccaggcggaagaagttgccgggcttgccagctatttaatgtctgatattgcgggttacgtcacccgccaggttatttccatcaacggagggatgttatgacacgtcgcgtagtgattacaggaatgggcggcgtgactgcctttggtgaaaactggcaggacgtttctgcacgcttactggcatatgaaaatgcggtgcgcaaaatgccggagtggcaggtctacgatgggctgcacaccctgcttggcgcgcctgttgatgatttcacgctaccggagcactacacccgcaagcgtatccgtgcgatgggccgcgtgtcgcaaatgtcgacccgtgccagcgagctggcgttagagcaggcagggttgattggcgatccgatattaaccagcggcgaaacgggcattgcgtacggttcatcgaccggcagtaccggcccggtaagcgagttcgccaccatgctgacggaaaagcacaccaataacatcactggcaccacctatgtgcagatgatgccgcacaccaccgccgttaatactggcctctttttcggcctgcgcgggcgggtgatcccaacctccagcgcctgtacttccggcagccaggcaatcggttatgcgtgggaagccattcgccacggttatcaaacggtgatggttgctggtggtgccgaagagttatgtccttcagaagcagcggtatttgatacgcttttcgccaccagccagcacaatgatgcgccgaaaaccacaccttcaccgttcgatgaaaaccgcgacgggctggtgattggtgaaggcgcaggtacgctcattctcgaagaactggagcacgccaaagcgcgcggcgcgaccatttacggtgaaatcgtcggctttgcgactaactgcgacgcggcacatattacccagccgcagcgcgaaaccatgcagtattgtatggagcaatcgctgaaaatcgccgggttaagcgcacaagatatcggctatatttcagcgcatggtacggcgaccgatcgcggtgatatggcagaaagtctggcgacagcaaccatttacggtgataatgtgccgctctcctcgctgaaaagttattttggtcatacgcttggtgcctgtggcgcgctcgaagcctggatgagtctgcaaatgatgcgcgaaggttggtttgcgcctacgctaaacctgaataaaccagacccgaattgtggcgcgctggattacatnatgcatgaagcccgcaaggttgattgtgagtttttgcagagtaacaactttgcctttggcggcattaatacatccatcatcattaaacgttggccctgatatgtatcggatagttctggggaaagtttcgaccttaagcgcagctccactgccaccgggtttacgcgagcaagcaccgcaaggtccacgacgcgaacgctggctggcggggcgtgcattgctttcgcacacgctttccccgctaccggagatcatctatggcgaacaaggcaaacctgcatttgcgccggaaacgccgctatggttcaacttaagccatagcggtgacgatatcgccctgctgttgagtgatgaaggcgaagtcggctgcgatatcgaagtgattcgcccgcgcgccaactggcgctggctggcgaacgccgtgttcagcctcggggaacatgctgagatggacgccgtgcatcctgatcagcaactggaaatgttctggcgcatctggacgcgcaaagaagccatcgttaaacagcgtggtggcagcgcctggcaaatcgtcagcgtagacagcacctatcactcctcgctgtcagtcagccattgtcagctagaaaatttaagcctggcgatctgcacccctactccctttacgctcaccgccgacagtgtgcaatggatcgattcagttaactgatccgcccacccgactgcccatctattgatccagaacaggtaatcagtatgacgaatacttaaaatcgtcatacttatttccgccatctattttaatccattggggttaccatgctctccacactccgccgcactctatttgcgctgctggcttgtgcgtcttttatcgtccatgccgctgcaccagatgaaatcaccaccgcctggccggtgaatgtcgggccactaaacccgcacctttacacgcctaaccagatgttcgcccagagcatggtttatgaaccattggtgaaatatcaggcagacggttcggtgatcccgtggctggcaaaaagctggactcattcagaagatggtaaaacctggaccttcaccctgcgtgatgacgtgaaattctctaacggcgaaccgtttgatgcagaggcggcggcagaaaacttccgcgcagtgctcgataaccgtcaacgtcacgcctggctggagctggcaaaccagattgttgatgttaaagcactcagtaaaacagagctgcaaatcaccctgaaaagcgcctactatcctttcctgcaagaactggccctgccgcgccctttccgctttatcgccccctcgcagtttaaaaaccatgaaaccatgaacgggattaaagcgccgattggcaccggaccgtgggttttgcaggaatcgaaactgaatcagtacgatgtcttcgtccgtaacgaaaactactggggcgaaaagccggcaattaagaagatcacttttaacgtcatcccggacccgactacccgsgcggtggcgtttgaaactggcgatatcgacctgctgtacggaaacgaagggttattaccgctcgataccttcgcccgctttagccagaacccggcttaccatacccaactgtcacagccgatcgaaaccgtgatgctggcgnttaataccgccaaagcccccaccaatgagcaggcagtacgtgaagctcttaattacgcggtaaacaaaaaatcgctgattgataacgcgttgtatggcacccagcaggtcgccgacaccctgtttgccccttctgtgccctacgccaacctcggcctgaaaccgcgccagtacgatccgcagaaagcgaaagcgttgctggaaaaagccggttggacgctgcctgcgggcaaagacatccgcgagaaaaatggtcagccgctgcacattgaactttcgttcatcggcaccgatgcgttaagcaaatcgatggcggaaatcattcaggctgatatgcgccagattggcgcagatgtctcgctgattggcgaagaagagagcagtatctatgcgcgtcagcgcgacggtcgttttggcatgattttccaccgcacctggggcgcnccatacgatccacacgccttcctgagttcaatgcgcgtaccgtcgcacgctgacttccaggcacagcaaggattagccgacaagccgctgattgataaagagatcggcgaagtgctggcgacccatgacgaagcacaacgtcaggcactgtatcgcgacattctgacccgtctgcatgacgaggcggtttatctgcctatcagttacatctcaatgatggtggtatcaaaaccggagctgggtaacatcccctacgcgccgatcgccaccgaaattccgttcgaacagattaaaccggtgaaaccttaatgttgcgttacgtattacgccgctttctgctgctgatcccgatggtgctcgccgcctcggtgatcatttttctgatgctgcgcctcggtaccggcgacccggcgctcgattatttgcgtctgtctaacctgccgccgacgccggagatgctggcctctacccgcaccatgctgggactggatcagccgctgtatgtgcagtacggcacctggttgtggaaggcgctgcatcttgatttcggcatctcatttgccacgcagcgcccggtgctggacgatatgctgaacttcctgcccgccacgctggaactggcgggtgcggcgctggtattaattctgctcacttccgtaccgctcggtatctgggcggcgcgccatcgtgaccgtctgccggatttcgccgtacgtttcatcgcgtttctcggcgtgtcgatgcccaacttctggctggcatttttactggtgatggcgttttcggtgtatctgcaatggctacccgcgatgggctacggcggctggcagcacatcattttgcctgcggtttccattgcctttatgtcgctggcgattaacgcacggctgctgcgcgccagtatgctggacgtcgccggtcagcgtcacgtcacctgggcgcggctacgcggcctgaatgacaaacagaccgagcgtcgtcatattctgcgcaatgcctcgctgccgatgatcaccgccgtggggatgcacattggcgaactgattggcgggacgatgattatcgaaaacatctttgcctggcccgnnnncgggcgctatgcggtgtcggcgatttttaaccgtgactatccggtgatccagtgctttacgctgatgatggtggtggtttttgtggtctgtaatttgattgtcgatttgctcaacgccgcactggacccacgcattcgtcgtcatgaaggagcgcacgcgtgaactttttcctctcttcccgctggtcggtacgcctggcgctgatcattatcgccctgctggcgctgattgcgctcaccagccagtggtggctgccgtatgacccccaggcgattgatttgccgtcgcgcctgctttcgccggatgcgcagcactggttgggcaccgatcacttagggcgcgatatcntctcgcggctgatggcagcgacccgtgtgtcgctcggttcggtaatggcctgcctgctgctggtgctgacattagggctggttattggcggcagcgccgggctgattggcgggcgcgttgatcaggctaccatgcgcgtcgccgatatgtttatgaccttcccgacctcgattctgtcattctttatggttggcgtgctcggcactgggctgaccaacgtaattatcgccatcgccctgtcgcactgggcgtggtatgcacgcatggtgcgcagcctggtgatttcactgcgccagcgcgagtttgtgctggcatcacggctttctggcgcgggccatgtgcgagtgtttgttgatcatctggcaggtgcggtgatcccttcgctgctggtgctggcaacgctggatatcggccatatgatgctgcacgttgccgggatgtccttcctcggcctcggcgtgaccgcgccgaccgccgaatggggcgtgatgattaacgacgcgcgccagtatatctggacccagccgctgcaaatgttctggccggggctggcgctgtttatcagcgtgatggcctttaacctggtgggtgacgcactgcgcgatcatctggatcctcatctggtgacggagcacgcacactaatgccgcaacagattgaactacgtaatatcgcgctacaggccgcgcagccgctggtgcacggcgtgtcgttaaccctgaaacgcgggcgcgtgctggcgttagtcggcggtagcggcagcgggaaatcattaacctgcgccgcgacgctgggaattctgcccgcaggcgttcgccagacggcgggggaaattttagccgatggcaaaccggtttctccctgcgccctgcgcggcatcaaaattgccaccatcatgcagaacccgcgcagcgcctttaatccactgcacaccatgcacacccacgcgcgggagacgtgcctggcgctggggaaacccgccgatgacgctacgcttaccgctgccatagaagcggtggggctggaaaacgccgcacgcgtgctgaagctgtacccgttcgagatgagcggcggcatgttgcagcgcatgatgattgcgatggcggtgctttgcgaatcaccgtttatcatcgccgatgaaccaaccaccgacctcgacgtggtagcacaggcacgcattctcgatctgctggaaagcattatgcaaaaacaggcgccggggatgctgctggtcacccatgatatgggcgtggtggcgcgtctggcggatgacgtagcggtaatgtctgacggtaagattgtcgaacagggcgatgtcgaaacgctgtttaacgcccccaaacatgcggtaacgcgcagcctggtttccgctcatctcgccctctacggtatggagctggcatcatgactttacttaacgtctccgacctttcccatcactatgcccacggtgggtttagcggaaaacatcagcaccaggcggtgctgaataacgtttccctgaccctgaaaagcggtgaaaccgtcgccctgctgggacgcagcggctgcggaaaaagcactctcgcgcggctactggtaggcttagaatcgccctcacagggaaatattagctggcgtggcgaatcgttggcaaagctcaatcgcgcccagcgtaaagcgttccgccgcgatattcagatggtatttcaggactccatcagcgccgtgaatccgcgcaaaaccgtgcgcgagatcctgcgggaaccgatgcgccacctgctatcgctgaaaaaatccgaacaactggcgcgtgccagcgaaatgctgcacgcggtcgatctcgacgacagcgtgctcgacaagcgcccaccgcagttaagcggcggccagctccagcgcgtctgcctggcacgcgcgctggcggtcgaaccgaaattgctgattctggatgaagccgtttctaaccttgatctcgtgttacaggcgggcgtcattcgcctgctgaaaaagctacaacaacagtttggcactgcctgcctgttcatcactcatgacttacgcctggtggaacgcttttgccagcgagtgatggtgatggacaacggacaaatcgtcgaaacccaggcggtgggagagaaattaaccttttcctctgacgccggacgtgtgctacaaaacgcgatattacccgcattccccgtgcgccgtcgcgccacagaaaaggtttaacgcaaatgcaacgagtcaccatcacgcttgatgacgatttactggagacgctggacagcctgagccagcgtcgtggttataacaaccgttccgaagctatccgcgatattctgcgtagcgccctggcgcaggaagctacccagcagcacggcacacaaggtttcgcggtgctgtcgtatgtgtatgaacacgaaaaacgcgacttagccagccgtattgtttccacccagcatcatcaccacgacctctccgtcgccacgctacatgtgcacatcaaccacgacgactgtctggaaatcgccgtgttgaaaggtgacatgggtgacgtgcagcattttgccgatgacgttatcgcccagcgcggcgtgcggcacgggcatttgcagtgcctgccgaaggaagattaacacctaccaacgcgccgttatttccttacggcgcagtaaacttctgacaaatatcgactcacgtcacatttttttgatcacgatttggtccctcaaaatgtgagacgcttcgatcctctttttctcccgttcacctactatacgcttgaagttgtccatgattgtccatagacaactgtaaatgttcaggtgcgcgccatgaaatcattaagtaagtcgtcacaaataccgctctatcaacaagtggtggagtggataagagaaagtatttataccggagatctggtggaagacgatcgcattccttcggaataccagattatggatatgctggacgtgagtcggggaaccgttaaaaaagcggtcgcccaactggtaaaagaaggcgtgttaatacaggtccagggtaagggaacatttgtcaaaaaagagaacgtggcatatccgttaggtgaaggattattgtcattcgcggaatcgctggaaagccagaaaatacattttaccactgaagttattacgtcacggattgaatcggctaatcgttatgtggcagagaaattaagaataacgcccggtcaggatattctttaccttgaacgcttacgctcaattggtgatgaaaaagcgatgctgatagagaaccgtatcaatattgagctatgccccggtattgctgaaatcgattttaatcaacacaatttatttccaacaatagaaagtttgtcgcaaagaaaaattcgttactcggaaagtcgctatgccgcgcgattaattggtaatgaacgtggtcattttttagatatcagtgaagacgcacccgttttgcatctggagcagttagtctttttctcccgaggattacccattgagtttggcaacgtctggttaaaaggaaataaatattatcttggcaccgtactgcaacggcgggaagtgagttaagtacacttttttaagaggaataaaatgcaaggcatacattttcaggaaaattatattcaacgacttccggcagggttaagcgttgaacagatcatccgtcagttagcgcaaccgttggttgccgccgagctggtcgtccctgattttgccgatcacgtactgaaacgtgaggcgacgtacccaacggggctgcctaccgaaccaccgtgcgtcgctattccgcacacggaccataaacatgtcaggcacaatgcaattgccgtcggcatcctgccggaaccggtagagtttgccgatatgggcggcgatcctgaccccgtacctgtcagggtgatttttttgctcgccttaagcgaaagtaataaacaattaaatgccctgggctggattatggaaatgattcaggatacgccctttatgcaagccctgcttgcgatggaaacaacagaaatacacacagtaatcttaaacaaaatgaaagaacgaggtgaaatatgagtcaaaccattttatttgtctgcgccacgggtattgccacatccacggcggtaacagaaaaagtcatggaatattgcaaagagcaaggtcttaacgtcaattattcccaaaccaacgttgcctctttacctggaaatactgacggcgtagcactggtagtttcaacaactaaagtgccttatgaactcgacgtcccggtggtgaacggcttgccgattattaccggtattggcgaagaaaaagtactggcgcaaattgtttctatccttaaaaagtaattaataataattaatttcaacccactccatcaggcgctaacgcgaggtgcgctctcgcctgaaaaagaggtttattatgaacgatatcgcgcataccctctataatnnnnt

SEQ ID NO: 1538 - DNA, 3981 bp, Escherichia coli
  Strain O55:H7
  modified_base (2963)..(2966): a, c, g or t
  modified_base (3041)..(3041): a, c, g or t
atatattgggatttggcccgacggtaatgttgccgttggtgttatttattcttgctctctgttttaaagtaaaacccgctaaagccttacgttcgtcattaacagtcggcattggttttgtcggtatttatgccattttcgatattctgaccagcaatgtcgggccagcggcccaggcgatggttgaacgcaccggaattaatttaccggtggtagatttaggctggccgccgctttccgctattacatggggttcgccaattgccccgtttgttattcccctgaccattctgattaacgtggcgatgctggcgttaaataaaacccgtaccgttgacgtagatatgtggaactactggcattttgcccttgctggtacgttggtttattacagcaccggcagcctgttctttggtttgctggcggcggcgattgctgcggtggtagtacttaaactcgccgactggtctgcgccactggtacaaaaatactttggactggaagggttctcattgccgacgctctcttcggtggtgttcttcccggtcggtctgctggtcgacaaaatcatcgaccatatccctggcctcaatcgtattcatatcgacccggaaaccgtacagaaaaagtttggcatcttcggcgaaccgatgatggttggcactattctgggcattctgctcggcgtaattgccggatacgatttcaaaaaagtattgctgcttggcatcagcattggcggtgtgatgttcatcctgccacgcatggtacgcatcctgatggaaggtttattaccgctgtctgaagctattaaaaagtatctcaatgccaaataccctgaccgtgacgatctctatatcggcctggatatcgccgttgccgtaggtaatccggcgattatctccaccgccctgctgctaacgccaatctcggtctttatcgcgtttgtccttccgggtaatgaagtcctgccgcttggcgaccttgccaacctggcggtaatggcgtcgatgattgctttagccagccgtggcaatattttccgcaccgttctggcggcgatcccggtgattattgccgacctatggattgctaccaaaatcgcgccgtttattaccggaatggcgaaagacgttaacttcaaatttgccgaaggctccagcggccaggtttccagttttcttgatggcggtaacccgttccgcttctggctgctggaaatcttcaacggcaatctcatcgccattggtctggtgccggttatcgccctggtactgtatggcattttccgaatgacgcggagcacggtttatgcctgataacagcgcagctatcgttatcgatattggcaccaccaattgcaaagtcacctgcttttcctgcctggacgcaacgacgttgggcgcgcataaattcgtgacggcaaagcagatctccccacagggcgatgtcgatttcgatatcgacgccctctggcaggaggtccgccaggcgatagcgcaactgaacgccgcttcgccgctgccagtcagacggatcagcattgccagttttggcgaatcaggcgtgttccttgacgagcatggcgagatcctgacgccaatgctggcatggtatgaccgtcgcggtgaagagtatctggcaacgcttagcgaggcagacagtgcggcactttatgacatctgcggtctaccactacacagcaattactctgccttcaaaatgcgctggttgctggaacattacccgctgcgtaatcgccgcggcctgcgctggctacatgcgccggaagtgctgctctggcggctgactggcgaacagcacacggatatcaccttagccagccgcacgctgtgtctggacgtgcgcaaaggcgaatggtcagcgaaagcggcggcgttgttacacgttccctgtacggcatttgcgccattggtgcagccaggcgagcacgccggatgggtcagcgagtcactttgcaagacgcttgggttctcgcaaccggtcagcgtgacgctggccggacatgaccatatggtgggtgcgcgagcgttgcagatgatgccaggcgatatccttaactcgacggggaccacggaaggcattctgcaactggatacacaaccgacgctggatgaacaggccaaacgtgacaagctggcaaacggctgttactcacttgccaaccagttcaccctgtttgcgtcgctgcccgtgggcggtttcgcgctggagtggctgcgcaacacgttccggctaaccgatgaggagatcgccgcatcacttactcgcggacatgctgattatctggcggggaattggttgctcgatgacattcccgtctttattccacatcttcgcggttcgggttcgccctataaaaatcgccatacccgtggattattttatgggcttggcgatacgttaagtatcgacatgttaattgccagcgtatcactgggattaaccatggaatttgccaactgcttcgcctgttttaacgtgcctggcaccagcgcgttaaaagtgatcggtccggcaacccataatcctctttggctgcaattaaaggcggatattttacagcgtccggttgaagcaattgcatttaacgaggcggtttctgtcggagcattattaaccgccgcaccggatattccaccgccgccagtcgctatagcccaacgtttgttaccgaatcgggcgagataccatcaattacagcgttatcagcacaaatggaaaagctggtatcagttgaaattacaacaagaaggcgtgatgccattacatcatcgagaggaacactatgttgaataaaaccgtggaggtcagaaacagtactggcctgcatgcacgtccggcggcctgtctggcgaaagccgccaaaaaatatagctgtaaagtgacgctgcactatgagggtaatgatattaatgccaccagcatgatgaatattatgnnnnccggaataaaaggcggaaaaacggtggaaatacgctgcgacggtgatgatgaaaacgaggccatacagactctcnccgacttatttcgcgaccgcttcggtgaagctgaataattaactgatattaaaagatgaggtttttcaatatgccattagttaatggacggatactgctcgaccgcattcaggaaaaacgggtattagcgggcgcatttaataccaccaatctggagacgacaatttcaattttaaacgctattgagcgttcgggattacccaacttcattcagattgcgccaaccaatgcacaactctcgggatacgattacatttatgaaatcgtgaaacgtcacgccgataaaatggatgttccggtcagtcttcatctggatcacgggaaaacccaggaggatgttaaacaggcggtgcgcgcgggctttacctcggtcatgattgacggtgccgcattctcttttgaagagaatatcgctttcacccaggaagctgtcgatttctgtaaatcctatggcgtaccggttgaagcggagctgggggcgattctcggcaaagaagatgatcacgtcagcgaagccgattgcaaaacggaaccggaaaaggtgaaaacctttgtcgagcgtaccggttgcgacatgctggcagtttctattggcaacgttcatggcctggacgatataccgcgtatcgatatccccctgctgaagcgcattgccgaagtctgtccggtgccgttggttattcacggcggctccggtatcgccccggagatattacgcagctttgttaattatcgcgtcgctaaagtaaatatcgccagcgatctgcgcaaagcgtttatcaccgccgtcggcaaagcgtatgtgaataatcacaacgaggcgaatctggcacgagtcatggcatcagcaaaaaacgccgtcgaggaagatgtgtatagcaaaatcctgatgatgaatgaggggcatcggttggttagaaaggcatcttaagagccacaa

SEQ ID NO: 1539 - DNA, 53031 bp, Escherichia coli
  Strain O55:H7
  modified_base (93)..(93): a, c, g or t
  modified_base (2655)..(2657): a, c, g or t
  modified_base (5112)..(5113): a, c, g or t
  modified_base (5120)..(5121): a, c, g or t
  modified_base (5366)..(5366): a, c, g or t
  modified_base (5587)..(5587): a, c, g or t
  modified_base (7769)..(7769): a, c, g or t
  modified_base (7783)..(7783): a, c, g or t
  modified_base (8928)..(8928): a, c, g or t
  modified_base (9193)..(9193): a, c, g or t
  modified_base (11906)..(11909): a, c, g or t
  modified_base (12572)..(12572): a, c, g or t
  modified_base (14049)..(14049): a, c, g or t
  modified_base (14547)..(14547): a, c, g or t
  modified_base (14936)..(14939): a, c, g or t
  modified_base (16779)..(16779): a, c, g or t
  modified_base (20683)..(20683): a, c, g or t
  modified_base (22364)..(22364): a, c, g or t
  modified_base (24830)..(24830): a, c, g or t
  modified_base (26084)..(26087): a, c, g or t
  modified_base (27812)..(27812): a, c, g or t
  modified_base (28368)..(28368): a, c, g or t
  modified_base (29230)..(29230): a, c, g or t
  modified_base (29709)..(29709): a, c, g or t
  modified_base (29713)..(29716): a, c, g or t
  modified_base (32027)..(32027): a, c, g or t
  modified_base (32095)..(32095): a, c, g or t
  modified_base (37166)..(37166): a, c, g or t
  modified_base (44175)..(44175): a, c, g or t
  modified_base (47425)..(47427): a, c, g or t
  modified_base (47536)..(47536): a, c, g or t
  modified_base (47538)..(47541): a, c, g or t
  modified_base (47906)..(47906): a, c, g or t
  modified_base (48231)..(48233): a, c, g or t
  modified_base (50407)..(50408): a, c, g or t
  modified_base (50414)..(50415): a, c, g or t
  modified_base (50762)..(50762): a, c, g or t
  modified_base (52516)..(52519): a, c, g or t
acagaaattgttgggccgctataagttataaatgattcaaacgctcattcagtgtttcaataatataggtattaacagagacttgttgctgcncagccgcattattaaggcgttcactcagcgattctggatagcgtaacgtaaaggtcttaatcttttctgtacgcgcatacggctcaatacccgcagctttacaatcctcaagatactctcgcagggaaagttccccttctttttgcagcccctgaatgctgtcagagacaaaatcacaataacctgacaagcccaggaatttgccacgaaatgcattcagttctggcacgtaagtgataacagcaggttgcccggcaatctccatagagtttggcgtcttcagtttgatcatggttttacccctatacttagtaaccagtcacgcacgctttctacagcgcctttatcggtatctggcgacggatgaggccgatggaaacacgcaacgctcatatttagtatgaacttacaacgcgaacctcttccttccttaatttctccgcctaatgctttaaccagtgactctatatcagaccacttgatcccttgaggaacaggagttttaaatatttgatccaatgtatttttttgtttcttccgtaaagcctgtaccttggttctcatggcatgtccttatgacttcactttatgacatcaatagtatgacatcacagtatgaagtcaagtttcccttccttacgccattgtcccaatcgtcttcctgaatcgcagcagcgcaatggtgaaaaacgcgccgccaattgccatcagcgtcaggaactgcggccagacgatttcgaatccggcaccacggtagagaatggcctgcgcgaggctaacaaagtgtgtcgtcggcatgatcagcataatgtcctgcaccatctgcggcatactttcgcgcggcgtggaaccaccggaaagcatttgcagcggcagcagcaccagaatcaccagcagccccagttgcggcattgaacgcgctattgtccccataaaaatgccgattgacgtggtggcaaacagactaagcgccacgcccagcataaacagcgggatcgagccttcaatcggtacgcccaacacgccttttaccatcagcaccagtgataatcccgataccaccagcaccaccaaccccatcgaccagatcttcgccatcatgatctcaaacggcgttatcggcatcaccagtaagtgttccaccgtgccgtgttcacgctcgcggatcagcgccgatccggtcaatacaatcgccagcatggtaatgttgttgatgatcgccatcaccccgccaaaccacgcgggatcaaggttcgggttaaagcgcatccgggtttccagcgataccaacggttcgctgttatcacggtagcgcgcgacaaagctgttcacttcaccgttgataatattctggatatacccattgccggtaaatgcctggctcatgcgcgtggcatcgacgttcacctgaatatctggctggcgtccggcgaggacatcacgctgaaaattaggcggaatatttatcgcaaaggtataacgcccggcgtccagtccggcatccatctcatcggcggtgatcatctccggtggcaaaaaccacgggcgatagaagctgttaacgatccggttcgataactgcgattgatccatatcggcaatggcgatcggtgccaggttcaacgatcctggcgtgacggtcgctgacgaatacaccgacaccgtaaacgagaagacaatcaatgtcagcatcgctttatcaccgagtagactgcgcaactctttgatacccagattaaaaatattgcgtaaatggcgcatcatccctcctgttttttcagcagcaggatgcttaagcccatcaccagcggtatggctatcagcaacgggataaaaagttgccacaaatcagtcagatccagcgctttcgagaacgtcccgcgggcgatagtcagaaaatgactggtcgggtaaacctcgccgatccaacgtcccggcccttccagcgaagctaccggatcgatcatcccggaaaactgtgtcgccgggatcaacgtgataatcgccgtaccgaaaatggcggcaatctggcttttcataaaggtggagatcagcagccccattccggtggcgatgatgatatacagcagcgccgccagggtgagcgtcaggaaactgcctttatgcggtacgccaaacacaaacaccgacaggccgcagagcaggaaaaagttcagcatccccagcgcgatgtacggcagctgtttgccaagcaaaaattcgctacgggtggtgggggtcacgtaaaggttgataatcgaccctagctctttttcccgcaccacgctaagggcgcttagcattgacgggatcatcatcagcagaagcgggatcaccgccggaacaatcgctggcaggctttttacgtccgggttatagcgataacgcgtctcaatattcatcagcccgctttggctggagggtgtggattgtcggctcgccacatcctatagccagctctggtgcatggcctgcacgtaaccttttacagtttcggcgcggctcggcatcgcaccgtcgatccagacaccgagttccacaggcgtaccacgcgcgatatcnnncccgaaattgggcgggatctcaattgccaccgtgatatcgcccgcacgcatccgacgatcaagctcgtcataactggtaagcagcggctgttcgataaagtaacgggaaccggagagattgagcgtccacgcctggctactgacggtctggtcgcagtcaagcaccgcaaagcgcaggttttccacatccatactgatgccgtaacccattatcagcatcaggatcactgttcccatcagcgccagcgtcgaacgtaccggatcgcgtcgcagttccagcgcttcgcggcggctgtagctaaacagacggcgcaggctaaatccctggcgcggcgcgtgtgtggtgtcgtgtatcacgggaggcgcttcggcttcgttgctctgtcctgccgcttcctgcaaataggcgataaatgcctcttccagactggcggctccgcgtttctcaaccagttcctgcggtgtaccgctggcgagcacttttccggcgtgcatcagagagatacggtcgcagcgttccgcttcgttcataaagtgggtggagatgaagatagtcactttgtcctggcgcgagagatcgaccatcaactgccagaacatatccctcgccaccggatcgacgccagaagtaggttcatcgaggattaacatttccgggcgatgaatcaccgccaccgccagcgaaagccgctggcgaatgccgagcggcaatgactccggcagaacatcttcaacgtcgttgagcttaaaacgctcgctcatttcagccactcttgcgggaatttccgcttccgggatgtgaaacaaacgggcatgtaactcaaggttttgccgcacggtgagctcgttatagagcgaaaacgcctgcgacatatagcccacccgacggcgagtatcgatatcttttggatcaaccggttgcccgaacagccacgcctcaccttcgctggcgggcagcaatccggtaagcattttcatggtggtggatttaccgcagccgttcgaaccaagaaaaccaaaaatctccccgcgtggaatgcggaaattgacgtgatcaacggcaacgaaggaaccaaaacgcatggtcagatcgcgcgcttcgatggcaatctctgcgttttcaggttgatatggtgggatcactaccgcctgatgcgcctggcgttgcgcttgcggtaacagatttataaatgcttcttccagcgtggcgctttgcgtttgctgccgcagctcttcggcgctgccagttgccaacacttctccggcattcatcgccaccaaccagtcgaagcgttccgcctcttccatataggccgtggcgaccagaacgctcatattgctctgccgctggcgaatactgtcgatcagatcccagaactgggcgcgggagagcgggtcaacccccgtcgtaggctcatcaagaatcaacagttccgggtcgtggattaacgcacagcacagccccagtttttgcttcatcccgccggagagtttccctgccggacgatcgcgaaacggtgctaacccggtgctggtcagcagctcattgattcgcacttcccgctccgctttgtcgtgaccgaacaggcgagcgaaaaaatcgacgttttcatacaccgacaaggtgtggtagaggtttttgcccagcccctgcggcatccaggcgatgcgcgggcagacgtcgcggcgatgcttcgggtcgcgcatatcgccgcccagcacgatcacattgccctgctcaatgacacgagcaccggaaatcaatgacaataaactcgacttcccgacgccatccggaccaatcagcccgaccatacagcgggccggaatatcgagtgtgatattgttcagcgcaacggtttttccataatgctggctcacgcccgccagttgcgcgacaggcgggacgggaaccagttccagatgcgtcattgcggcaacctcaccacgaggtcgtcaggccacggaagttcttcattcacccgcacccacgctacgcccggcaagcccgttttgacatattccagatgctgctggagtaattccggtgggatacgcgctttgacgcggaacatcagtttcagccgttcatcgctggtttcgacggtttttggcgtgaactgggcgacactggcgacaaaactgatggttgcaggaatacgcagatctggcgcggcatcgaggatcagccgggcttcaccgccaagtttcagcgtgcccgcctgttcggttggcaggaagaaggtcatatagacgtcgctgagatcgaccatattcagcacccgaccgcctgccgccagcacttcccctggctcggcaacccgatactgcacgcgtccgtcacgcggggctttcagttcgctgtcatcgatatctgcggcaatgcgccgttcagtggcttgtgcggcttcgacgcgggtttgcgcctgaatgatattggtgcgtgccgcttctnnagcggcnntagaagccgaaacctgggcttttgctgattccagcgcagctcgggcgctctcagcggcggcgcgatcgtcatccagctgttgcgcagaaatagcccctcgttgggcgagcgagcgggaacgcgtatgacgtttggcaacggagtccagttcggcctggcgttgattaaccagcgactgtgcggcgcgagtttcgctttgtcgttgctccagcaaagcctgcgcggcggcaacggcgctttgtgcntctttgatttgcgcgatggcttccagtcgctgctcctgcaacacgcgagtatccatcttcgccagcacttcgccttcgcgaacaaactggccttctttcaccagaatggtgtcgatacgcccggcaattttgctggcgatatccacttccgtcgcttcaatgcgcccattgctgacggcaaagccttccggcacacctgccgggcgcaacagccaccacgntacgatagcagccaccgccagtaacccgacaccccaccacgccagatggcgcttactcttatccataatcgacccgccataatccctgtaagcaaacgacgcgtgttacaactgccgccgaacgacgttcagcggattcttccatccgggataagaaggaaacgacaaatacgaccagcgcgcagagcattgagcgccaacggggaaggcttagtgaaaacgggtagtaatgttgtcatcatcagcattcctggccgtaaatgaaacacgcatactcataagtgtgatctataaaactggctgacaaaacggtatccatcctgttggatagcgtttcacgcctgttcagttgcaggaacagagcattccttattacgttttatcaacagtctcaaccagatagtaacattaatattcatgttgtctatggttcagagctgtaacattgtgcgccttctaatcaaaggcataagtccatttctgtttttttcatgttggtaagacttccagggagtggttatctcaggccccgcaccagggttaatttggcaattatgcatgctgaacattcttcccgtatgtttactgtcacgggcgttaagacctaaaactgtccccgtttcacctatgcgttctcttccaccattaccgttatgtgcaacaacttgatttatacctaacatttgtgagcatgctaatagtgcttcaagtttaggtctgtaatctgtcgaaacagaaaaataacgattaaaggatcgacaagagatagcccggctagttttaaactttttactattaattatagtatgatgctttttattaataattgccgctaattcgaccggatcgagagcattggtcatttcatcaatagagaccgttatcggtcctataatgtaacgttttcgctgatcatcaaaagttatcccatgatgatttgccattattttgtatttggagtcatagaaacatacaggataatcttttatcccgtcgtaggtatcctcatcaagtggtttcatacgcgtgaagttctgcatatagttaccattgcaattcgtttcatgatttccagctaatacatgaacgttatcattgatgctcattatgcgttttaacaaatcgatgataaattgatcgccacagatattactaaatcgatcgccggtttggtcacccaaaaacgtacatggcgtcactgcgtctttattaataactaaataaggctgaagactttctaaaataatgtctcttctgttcaggatactgattattgtattaacattagtatcaagttgctcattaaagttctcccttagcaatacattgagaacttcatcttctatattaagcaactggctaaggaaattttctccttcagccatgattcccaaatgtcccgttgcaaaaagcgcgtacaaaactgcaccaactgagccatcggtatcaccaaaataggttggtctggtacttgtgggatcaacaggtgaacaattggagaaatagattctgtcagcgaactggggttttataattgtttcgaatttaatatcagatacattgtattgcgatattttccagttccagatgggtttgtacgactcagtaactgcaacatcattagcattatcatttactgtcatattattaagtaaataaacaatgctgcaccaattaatatcggtattatcaagagggcaaccgtaatttttgctattaatcgtcacaataaactgataatggttattcctacgtagaatatgagcacgcatgcccgatagcatactatatttttctgaataatccgtttgtatggtaaatgaaattttgtcatcttgaatagattgttggaaccgttctatttgccaatcatctactttttccagaacctcaccgagcattgtcctagcaatacttgatatatcatcacctataccatttgcaatatacccaaacagttctttagtgaagttagtaacatgctcttgcaccatatcatttgttgcgattgtcgttgtactgtcgttagtacctgccacagttccaattttcatcttttacctcatataattcaccgcgaggaatacatagttatcatttaatcttatgacatacacctcatgttcgatggaaaaataattatattttgcacaaatcattcagccttaaagcataatatganatttcttatctcanagtagagaaagtccctaaagattgtagaggcgtcatcagtacatgcctctacaatcgattaagaaaaactatgaaatactggcaggattaaaaagatataccacagcactcatagagttttaatgtggttgaaaacaacttagtcctgaggaagaacctattatttttttattttcatcaaacactgccatcctggaatttagccccataacaccattatcaaattgttgattctgatttacccctaacccatgatggccatatttttgtctaatgtttttgcgggggtcgccacattcgagcgtctgtccacatttgaagatatcttcaggatctggtctgaaatcagtagtgttatttaaataatcagcatatacaggtgtgggtgccatagtattgcttctaattagatggaaaagatgatcatccatatgttgtttatgttttttattaaatatatatgctaattcctcaggatcagtaggatttttcatctgattaaatggaacctgcaaagcaccgagacaataacatttattttcttcatcccttattattccgtgatgactggttaaaacatgcctttctgagtcataattacaaacatcgagcgttttaattaagttatatgtatcaccggaagagagtttatgatttgctagtcgtgcactatagttaccattaaaattgatttcatgatttccagccagaacaacgacatttttatttatacgactatctttattaccctccatatttcgcatagaatttagcaaagtaaggatatatttatcaccaaaaatagtactgaatctatcgcctgtatgatccccaaggaagatacaaggggtaatcgcatcgccttttaaaaaaacatgttgatgcaactcattcaagatcatgtctctcttatctaataaagtgaagagttttttcaattttttatttttatatgcgaatgaagccatgtcttcgtgtttcaataaatcacataataaactcccccccttttccctgatgcctatatgccctgaaacgagcaatgcataaagtacagcgcctactcttccatctgtatcgccaaaataagccgtgttggcattttgtgggttaatcacaccacactgtttataaaagtctatttntgaaaaaacagattcaacatagctatcaaacttttccttagtaaacgtctctttagagacagcccaacgccagtcaggtttgaaattaccactaagaagagtaaagaaatttctctctttgatagaaaacccatcaactttataaattatgtctgatttatccccggagaaattaataaaataataaccgtccttacgctcaatcgtaacggtaatgggagacgataattttatcacatggttattgtctggtataattgtaaanataaacgtgtcagtagtattgtcggcgaaactattatattctttaatatctatagatggctcactattgtaaaaccatattttctctatctgaggactatgttcagttacgttccagcagccatgttgcaggaaatagatgatatgcaggccaaaatcgttatctatttgcgaatgtttatccagcttatcaatttcaactatctctgaacgatgttttttatcaaccttgccatggtgttgatgattattaactttatctgaatgcttatcttgatggtttgaagagatgtacttaaatatattgtgaaatactttcataaataacccgtgatatttttgacttgttagtaacaaaataaatgatacatgtctgaaagacatattttttgaccgatataaagcaataatgcgtatatactcgctgattttaagcaccgagaccatccggtcttttaccaaataatgaaaaagaatccctccctggaagataattgtaaaaaacaacagaataagaattaatcttaggataaatatttatttatcatggccttttgaacgctgaaaagtagcgctctgcaaagtaaaccccgctatagttatgctatgcatttgtctttaatgatatctcgtcattgtattaacaggctgaaattatcattaatgcacatttcaatattagcagggatacctgaggagtttaaagtgaacatatatatcgggtggcttttcaaattaatccctttaattatgggcttgatttgtatcgcgttaggtggctttgtgctggaaagttcagggcaaagcgagtatttcgtcgcgggtcatgtgctcatttctctggcagccatatgcctggcattattcactaccgcatttattatcatttcgcagctcacgcgcggcgttaatacgttttacaatacattgttccccattattggctatgcggggtcaattatcaccatgatatggggttgggcactgttagcaggtaatgatgtgatggcagacgagtttgtcgccggccatgttattttcggcgttggtatgattgccgcctgtgtatcgacggtggcagcgtcatccggtcactttctgctcattcctaaaaacgcagcggggagcaagagcgacggaacaccggtacaggcttattcttcattaatcggtaattgcctcattgccgttcccgtgttactcaccctgctcggtttcatttggtctattacgctgttacgtagtgccgacataactccgcattatgtcgccggtcacgtattgctcgggttaaccgcaatctgtgcctgtctaattggccttgttgccacaatcgtccatcaaacacgtaatacgttttcaacgaaagagcactggctgtggtgttattgggttatttttctcggctcaatcacggtgctgcagggcatatacgtcttagtcagttctgatgcaagcgcccgactggctcccggtattatcctcatttgcttgggaatgatctgttacagcatattctcaaaagtctggctactggcactggtctggagacgtacctgttcgttagccaacagaataccgatgattcccgtcttcacctgcctgttttgccttttcctggcatcgtttcttgcggaaatggcgcagaccgatatgggatattttattccttcgcgggttctggtcggtttgggagcggtatgctttacgttgttctcaatcgtttcaatattagaagcgggttctgctaaaaaataattgcaacgtaccggataaaaccagcgttaaccatttgcgtaacgctggtttttcttaggtagaatgaaataacgcagcattaatgcatagtggttaagtataaaaaacagcaaagttactgtttttttttcaacctgttcatattttataaagatcagcccactgggtgagttttcaatcacctttccctccaccttatattaagcatggggggttcagttcacgggctcattagaaaataatcacaagatagccactatcaaaattagctcatttttaatgcgactctaataattttcatctttaggaaaaatagctcagcacgacttcgctgcaatcaaatcctgcgcacaagcccacgcactcgaccacgcccactggaagttatagccccccagccagccggtaacgtccatcacttcgccgataaagtacagcccaagcactttgcgcgcttccatcgtccgtgaagagagttcgttggtgtccacgccgccgagcgtcacttcggcagtgcgatagccttcagtgccgttgggttgtacgcgccagtcggtcaatgtgctaatcagtgcctgttggtcacgcacgttgagctgttttagcgaaacatccgggatttgcccgagttgctgtaagcgttcaaccaaccgcttcggtagatgaaccgccagtgtgtttttcaggctctgattcggatgtgcgttacgctgctcattcaggaaggtttcgaggtccacatccggtagcagattgatactgacaaattcccccggttgccagtagctggaaatttgcaacaccgccggtccagacaagccgcgatgggtgaagagtaagttctcacggaaaacggtgccgttttcagcggtaatcacggaaggcaccgccacgcccgccagcacctgtaactcttcgagcaacggtttatgcagagtgaatggcaccagacccgnnnnggtcggcagcacgttgaggccaaattgttcggcaatcttataaccaaacggcgacgcgcccaggcccggcattgacagcccgccggtcgcgatgaccagcttttcacaaccgacagtcatgccgttcagttcaagcgtgaagcctgtatcatccttcgccacactcagcacttcgctacgcaatctgacggtcacattgcccttctcgcactcatccaccagcatgtcgacaatctgctgcgcggagtcatcgcagaagagttgccctaacgttttctcgtgccaggcgatgccgtgtttattgaccagatcaatgaaatcccactgggtaaaacgcgcgagtgcagacttacaaaaatgcggattctggctcagataagcgcccggttcgacataaaggttggtaaagttgcagcgcccaccgccagacataaggattttgcgccctggttttttaccattatcgatcagcagaacccggcgtcctgcctgacctgccagcgcagaacagaacatacccgccgcaccagcgcctataataatggcatcaaacctttccacgttgcgctcctcttagaaaaaacgggcgtgaattgtaaagattcctcagtggtcgcaccagcatcaatattactaaaaggaagtatttgcctgaattatatnagataattattttttgagtgaaatccatacaggaggcaaatcaaaaaaagtctatatttcactttgcccgcgccgcgaaagtcactgataatgcgccgcgttcatgtcctcaaaatggcgtaaccgtcctatgctacatttgtttgctggcctggatttgcataccgggctgttattattgcttgcactggcttttgtgctgttctacgaagccatcaatggtttccatgacacagccaacgccgtggcaaccgttatctatacccgcgcgatgcgttctcagctcgccgtggttatggcagcggtgttcaactttttgggtgttttgctgggtggtctgagtgttgcctatgccattgtgcatatgctgccgacggatctgctgcttaatatgggatcgtctcatggccttgccatggtgttctctatgttgctggcggcgattatctggaacctgggtacctggtactttggtttgcctgcatccagctctcatacgctgattggcgcgatcatcgggattggtttaaccaatgcgttgatgaccgggacgtcagtggtggatgcactcaatatcccgaaagtattaagtattttcggttctctgatcgtttcccctattgtcggcctggtgtttgctggcggtctgattttcttgctgcgtcgctactggagcggcaccaagaaacgcgcccgtatccacctgaccccagcggagcgtgaaaagaaagacggcaagaaaaagccgccgttctggacgcgtatcgcgctgatcctttccgctatcggcgtggcgttttcgcacggcgcaaacgatggtcagaaaggcattggtctggttatgttggtattgattggtgtcgcaccagcaggcttcgtggtgaacatgaatgccactggctacgaaatcacccgtacccgtgatgccatcaacaacgtcgaagcttactttgagcagcatcctgcgctgctgaaacaagctactggtgctgatcagttagtaccggctccggaagctggcgcaacgcaacctgcggagttccactgccatccgtcgaataccattaacgcgctcaaccgcctgaaaggtatgttgaccaccgatgtggaaagctacgacaagctgtcgcttgatcaacgtagccagatgcgccgcattatgctgtgcgtttctgacactatcgacaaagtggtgaagatgcctggcgtgagtgctgacgatcagcgcctgttgaagaaactgaagtccgacatgcttagcaccatcgagtatgcaccggtgtggatcatcatggcggtcgcgctggcgttaggtatcggtacgatgattggctggcgtcgtgtggcaacgactatcggtgagaaaatcggtaagaaaggcatgacctacgctcaggggatgtctgcccagatgactgcggcagtgtctatcggcctggcgagttataccgggatgccggtttccactactcacgtnctctcctcttctgtcgcggggacgatggtggtagatggtggcggcttacagcgtaaaaccgtgaccagcattctgatggcctgggtgtttacccttccggctgcggtactgctttccggcgggctttactggctctccttgcagttcctgtaatagtacgcaccaaaacgagcgggtcagtttactggcccgctttttttatgcgttattattgctgaagtgcttaatgccaaatcatcaaggcaatcaggctgaccaccaccagaccacacaatgcgctggtcagaataaactgccgacgcacccgctcacagcggcgaataaactcatcatcgtgatgatcgcgataacgttgggcatagatataccaaacgagacgcacctgtttgttgggttggccatgtgaggtaaaaaagccccctccatcaacatattgatagagcaatggatcgcagttacgcagtaccactaacaacgcgcgtagtgatgagaaatagngcgccatgttaacaatgcaaacgacacataaagcccaaaataatgcgacggtgcttatcatacctcctccccggcgacctgcccgcggagttccaccccggggctaccgctcccgatacgctgccaatcagttaacaccaggtcctggagaaaccgcttttgtggtgaccaacatccgagcggctctatagatagtgtaggagatcaggttgttttttttccagaaggttaaccactatcaatatattcatgtcgaaaatttgtttatctaacgggtaagcaaggcggattgacggatcatccgggtcgctataaggtaaggatggtcttaacactgaatctttacggctgggttagccccgcgcacgtagttcgcaggacgcgggtgnnnntaacggcacaagaaacgctagctggccagtcatcgacaactttatggaaggagtaacactatggcttataaacacattctcatcgcggtcgatctctccccggaaagcaaagttctggtagagaaagcagtctctatggctcgcccatacaatgcgaaagtttctctgatccacgtagatgtaaactactctgacctatataccgggcttattgatgtgaatcttggtgatatgcagaaacgcatctctgaagagacacatcatgcgctgaccgagctttccactaatgcaggctacccaatcactgaaaccctgagcggcagcggcgacctgggccaggttctggtcgatgcaatcaagaaatacgatatggatctagtggtttgtggtcaccaccaggacttctggagcaaactgatgtcttccgcacgtcagctgatcaacaccgttcacgttgatatgctgattgttccgctgcgcgacgaagaagaataatcttccctccacgacgtgttcctgaacgcccgcatatgcgggcgttttgctttttgtcgcgccttgttacctgatcagcgtaaacgccttatctggcctacggtctgcgttcgcaatcaaaatccccagccaatacaatatttaacaccaccatattttccatcattagtgtgatcagctggttattttctgttgtaatagtgtattaatctattcaccgcatcaatattaagaatctctgacagatgtaaactttttcgcgcgttatcccttacgcgttcatacttttcaggatggtattggaaggttaataaatatgaatacaacaacacccatggggatgctgcagcaacctcgcccatttttcatgatcttttttgtcgagttatgggagcgattcggctactacggcgtgcagggcgtactggcggttttcttcgttaaacagcttggattctcgcaagagcaggcttttgtcacttttggtgcttttgctgcgctggtctatggcctcatttccattggcggctatgtcggcgaccacctgctggggaccaaacgcaccatcgttcttggagcacttgtgctggcgattggctacttcatgaccggcatgtcgctacttaagcctgacctgattttcatcgccctggggactatcgctgtcggtaacggcctgtttaaagctaacccagccagcttgctttcgaagtgctatccgccgaaagatccgcgccttgatggcgcattcaccctgttctatatgtcgatcaatatcggctcgttgatagcgttatcgctggcccctgtgatcgctgataaattcggctattcagtcacctacaacctgtgcggtgcggggttaattatcgcattactggtttacatcgcctgtcgtggaatggtgaaagacattggttctgagcccgacttccggccaatgagcttcagcaaactgttgtacgtattacttggcagcgtggtgatgatcttcgtctgcgcctggctgatgcacaacgtagaagtcgccaatctggtgctgattgttctctccatcgtcgtcaccatcatcttctttcgtcaggcattcaagctggataaaaccgggcgcaataaaatgtttgtcgcctttgtcctgatgctcgaagcggtggtgttttacattctctacgcccagatgccaacatcgctgaacttctttgccatcaacaacgtgcatcatgaaattctcggtttttccatcaacccggtcagcttccaggcgcttaacccgttctgggtggtactcgccagcccaatactggcaggcatttacacgcatctgggtaacaaaggcaaagacctntcgatgccgatgaaatttactctcggcatgtttatgtgctcactgggctttttgacggcggcagctgcgggaatgtggtttgcggatgcacaagggctgacatcgccatggtttatcgtgctggtgtacttattccagagcttaggtgaactgtttattagcgcccttggcctggcgatgattgctgctctggtgccgcagcatttgatgggctttattctcgggatgtggttcctgacacaggctgccgcgttcttgctgggcggctatgtggcaacatttaccgcagtaccagacaacattaccgatccgcttgagacgttgcctgtctataccaacgtgtttggtaagattggtctggtcacgctgggcgttgcagtagtgatgctgttgatggtgccgtggctgaaacgcatgattgcgacgccggaaagccattaattattcttgcagaaagcagggtagcgttatcgctaccctgctttacttttacactggcgtacctgcatagatatcaaagcgatgccctttagtcacaaccgcgtttggcgtggcgacattcgctagcggtggcgcgtagtccgggcgctttaccaccacgcgtttggtcgccagcaagcgtgcaggctccagtaatccatcggcatcaagatccggtcccaccagcgactgaaagacgcgcatctcttttttcaccagcgcgcttttctgcttatgcgggaacatcgggtcgagatagaccacctgcggacgcggggtaatatcggtcagcgccgtcaggctggaggcgtgaattaactgcaaacgctcctgcaaccagccgccgatttccgcatccgcatatccacgcgccaggccgtcgtcgagtagcgcggcaacgactggattacgctccagcatccgcacgcggcagccgaccgaagccagcacaaaggcatcgcgccccagccctgcggtagcgtccaccacatccggcaaataatcgcctttaatgcccaccgctttcgccaccgcctcaccgcgaccaccgccgaatttgcgtcggtgcgccatcgctccgccaacaaaatcaacaaagatgccgccaagttttggctcatcacgcttgcgcaattccagatgttccggcgttaacaccagcgccatcaggttgtcttcatcgtgctccagcccccagcgggccgccagaacagataaggcaccgtctccggtgcctgtttcatcaattaagcagattttcactgaatgatcagcccttaatgccgtaatgctccagcatcgcatccagctgcggttcacgaccacggaagcgtttgaacagatccatcggctcttctgaaccgccacggctcagaatgttgtcgaggaacgactgcccggtttcacggttgaaaatgccctcttcctcaaagcgcgagaaagcatctgccgccagtacgtcagcccacaggtagctgtagtaacctgcggcataaccaccggcgaaaatatggctgaaagcgtgcgggaaacggccccaggatggagacggtactacggcaaccagtttcttgatttctgccagagtttcgaggattttcgctccctgatccgggcggaactcggcatggaggcggaaatcgaacaggccgaactccagctggcgcagaataaacagcgccgcctggtagttcttcgccgccagcattttatccagcaactctttcggcagcggttcgccggtttcgtagtgaccagagataaacgccagcgcctccggctcccagcaccagttttccataaactgactcggcagttcgaccgcatcccacggcacaccgctgataccggaaacaccggcggtttcgatgcgggtcagcatatggtgcaggccgtgaccgaactcgtggaacagagtgatcacttcgtcgtgagtgaacagcgccggtttaccattcaccgggcggttgaagttacaggtcagatacgcgaccggtttttgcagcgaaccatcggctttacgcatctggcctacgcagtcatccatccacgccccgccgcgcttgttttcacgggcatacaggtcgaggtagaaactgccgcgcagttcgttgttctcgtcatacagttcgaagaaacgtacatccgggtgccagacatcaacatctttacgctctttagcggtgatgccgtaaatacgttttaccacttcaaacaagccgttaaccgctttgttttccgggaagtacggacgcagttgttcgtcgctgatgctgtagaggtgctgtttttgtttttcgctgtagtatgcgatatcccacggttgcaactcatccacgccaaattcggctttggcgaaggcacgcagttgcgccagctctttttcgccctgcggacgcgcgcgttttgccagatcggttaagaaatcaagcacctgctgcgggttttccgccattttggtagccagtgatttaaacgcgtagttttcaaagcccagcagttgcgccagttcgtgacgcagcgcgaggatctcttccatcaccttgctgttatcccatttaccggcgtttggaccttgatctgaagcgcgggtgctgtaagcacgatacatctcttcacgcaagacctggttgtcgcagtaggtcattaccggcaagtagcttgggatatccagcgtcaacaggtagccttccagctctttcgcttcggcctgggcttttgccgcagccagcgcgctttctggcatccccgccagttccgcttcgtcggtaacgagtttagtccagcccatcgtcgcatcaaggacgttgttgctgtactggttgcccagttcagaaagacgagtggcaatttcgccgtaacgctgttgtttctctttcggcagaccgatgcctgagagttcaaaatcgcgcagtgcgttatcaaccgcttttttctgagccgtgttcagcgtggcgtaatgatcgccatcgcgcaggtcgcggtacgctttatacagcccttcatgttgccctacccaggtgctgtattccgacagcagcggcagagtttgttcgtacgcttcgcgcaattccgggctatttttcaccgagttcaggtggctgaccggggagaaaatacgccccaacacatcgtccacttccgccaacggctggcagagattttcccaggtgtacggtgctccttgcgctactacgcgctccacattttcgcggcagtcattcaatgccttagtcacggctggaacgacatgttccgggagaattttagaaaacggaggcaattcaaagggagtcagtaacggattcgtcattagcgcagtcctggttaaagaggttaaggaagcgctcaacaggcgctttacataatgtttgtagcatggggttaagtgtagtgaatttcaatgagaaacgttacgctttcgcggcggcggcctcttttcggtatactgtcctgataggcttttgtgcgccccgaatacgggccgatttttacttaccggaacacctttacccatgctcagttatcgccacagctttcacgctggcaaccacgccgacgtccttaaacataccgttcagagcctgatcatcgagtcgctgaaagagaaagataaaccgtttctctatctcgacacccacgcaggggccgggcgttatcagttaggcagcgaacatgccgagcgtaccggcgaatatctcgaaggtatcgcccgtatctggcagcaggacgatttgcctgcggagctggagccgtacatcaatgtggtaaaacacttcaaccgtagcggtcagttgcgttactaccccggttcaccgttgattgcccgtcagttactgcgtgaacaggacagcctgcaactgaccgaactgcacccgagcgattacccgttgctgcgttctgaatttcagaaagacagccgtgngcgcgtcgaaaaatccgacggtttccagcagcttaaggccaaactgccgccggtttctcgccgtggtttaatccttatcgatccgccgtatgaaatgaaaaccgactatcaggcggtagtcagcgggatagcagaaggttacaaacgtttcgccactggcacttacgcattgtggtatccggtggtgctgcgccagcaaattaagcgcatgatccacgacctggaagcgaccggcattcgcaaaattctgcaaattgaactggcggtactgccagacagcgatcgccgtggcatgaccgcttccggcatgattgtgattaacccgccgtggaaactggaacagcagatgaataacgtgctgccgtggctgcacagcaaactggttccagctggcaccgggcacgccaccgtaagctggatcgtgccagagtaattgcagccattgctggcacctattacgtctcgcgctacaatcgcggtaatcaacgataaggacactctgtcatgactaaacactatgattacatcgccatcggcggcggcagcggcggtatcgcctccatcaaccgcgcggctatgtacggtcagaaatgcgcgctgattgaagccaaagagctgggcggcacctgcgtgaacgtcggctgcgtaccgaagaaagtgatgtggcacgcggcgcaaatccgtgaagcgatccatatgtacggcccggattatggttttgataccactatcaataaattcaactgggaaacgttgatcgccagccgtaccgcctatatcgaccgtattcatacttcctatgaaaacgtgctcggtaaaaataacgttgatgtaatcaaaggctttgcccgcttcgttgatgccaaaacgctggaagttaacggtgaaaccatcacagccgatcatattctgatcgccaccggcggtcgtccgagccacccggatattccgggcgtggaatacggtattgattctgatggtttctttgcccttcctgctttgccagagcgtgtggcggttgttggcgcgggttacatcgccgttgagctggctggcgtgattaacggcctcggcgcgaaaacgcatctgtttgtgcgtaaacatgcgccgctgcgcagcttcgacccgatgatctctgaaacgctggtcgaagtgatgaacgccgaaggcccgcagttgcacaccaacgccatcccgaaagcggtagtgaaaaatgccgatggtagcctgacgctggagctggaagatggtcgcagtgaaacggtggattgcctgatttgggcgattggccgcgagcctgccaatgacaacatcaacctcgaagccgctggcgttaaaaccaacgaaaaaggctatatcgtcgtcgataaatatcaaaacaccaacgttgaaggtatttacgcggtgggcgataacacgggtgcagtagaactgacaccggtggcagttgcagcgggtcgccgtctctctgaacgcctgtttaataacaagccggatgagcatctggattacagcaacattccgaccgtggtcttcagccatccgccgattggtactgttggtttaacggaaccgcaggcgcgcgagcagtacggcgacgatcaggtgaaagtgtataaatcctctttcaccgcgatgtataccgccgtcaccactcaccgccagccgtgccgcatgaagntggtgtgcgttgggccagaagagaagattgtcggtattcacggcattggttttggtatggacgaaatgttgcagggcttcgcggtggcactgaagatgggcgcaaccaaaaaagacttcgataataccgtcgccattcacccaacggcggcagaagagttcgtgaccatgcgttaaatgttaaagggcaaagagtggtgtgctctttgcccttaattacgtttccgctatcagttcagaagctgaagcagaaagcggatcagttccagcagcgcaattaacgccccaagaacgatgattgctttatcaatcacccgtgttctccatacgatggagtgagaatgcatccgcttactcatccatcgcctgtcacggcgcatgccctattgttagataatggtattctcactccggccagagcatcagttaacggcaccacccgtaccactgaacaggactttgaaagcgtttatgcgcattgccagagtgaaaatgcctcagagctaactggataatcatacagtatattcaggttataaaaccagcatgtccttgcaatagtttcagtatggtattagtattgatgcgttagatgatggcattctcactccagccagagccaccaactcagggctgaagagtaaaaaaaccgacgcgaagtcggtttttttacatccggattcggacaaagcctggtacggcagcgacccgatgaaagtatataaatcctctttcaccaacatgtatagcaaactgtcccttctccagctgaagaaatcgctaacgcttgcaatgttagccactggctaatagtattgaaccgttagatgtgggcattctcactccagccagagccaccaactctgggctggaaagtaaaaaaccgacgcaaagtcggtttttttacgtcctgattcagacctcctttcaaatgaatagccaacgcttaattcacacctattaccttcctctgcacatacacattcgttaaaccatatatgtttttgacttatccgcttcgaagagagacactacctgcaacaatcaggagcgcaatatgtcatttctgttacccatccaactgttcaaaattcttgccgatgaaacccgtctgggcatcgttttactgctcagcgagctgggagagttatgcgtctgtgatctctgcactgctctcgaccagtcgcagcccaagatctcccgccatctggcgcttcttcgtgaaagcggtttgttgctggatcgcaagcagggtaagtgggttcattaccgcttatcaccgcatattccatcatgggccgcgaaaattattgagcaggcctggcgatgcgaacaggaaaaggttcaggtgattgtccgcaacctggccagacaaaattgttccgtagacagtaagaacacttgtagttaaaaaatttatctaaacacatatggatttgcacatgtgtttttccgggaggcattatgttactggcaggcgctatctttgtcctgaccattgtattggttatctggcagccgaaaggtttaggcatcggctggagtgcaacgctcggcgcagtactggcgttagttacgggcgtagtacatccgggcgatattccggtggtgtggaatatcgtctggaacgcgacggctgcgtttattgccgttattatcatcagcctgctgctggatgagtccggcttttttgaatgggcggcactgcacgttgcacgctggggcaatggacgcggtcgcttgctgtttacctggattgtcctgctcggtgctgccgttgccgccctgtttgccaatgatggcgcggcgcttattttgacaccgattgtcatcgccatgctgctggctttagggttcagtaaaggcactacgctggcgtttgtgatggcggccggattcattgccgataccgccagcctgccgcttattgtctccaacctggtgaatatcgtttccgcagatttctttggcctcggctttcgcgaatatgcctcggtgatggtgccggtggatatcgccgcgattgttgccacgctggtgatgttgcatctctatttccgcaaagatattccgcagaactacgacatggcgctgctgaaatctcccgcagaagcgattaaagatcctgctacgttcaaaactggctgggttgttttactgcttctgctggtgggatttttcgtcctggaaccgctcggcattccggtcagcgccattgcggcagtgggcgcgttgatattatttgtcgtcgctaaacgcggtcatgcgattaatacgggtaaagtgctgcgcggtgcgccctggcagattgtcatcttctcgctcggcatgtatctggtggtttatggcctgcgcaatgccggattaacggaatatctttctggcgtactcaacgtgctggcggataacggcctgtgggccgcgacgctcggcaccggattcctcaccgccttcctctcttctattntgaacaatatgccgacggtactggttggcgcgttgtccattgatggcagcacggcatctggcgttatcaaagaagcgatggtttatgccaacgtgattggctgcgatttggggccgaaaatcaccccgattggtagcctggcaacgctgctctggctgcacgtactttcgcagaagaatatgactatcagctggggatattacttccgtacagggattatcatgaccctgcctgtgctgtttgtgacgctggctgcgctggcgctacgtctctctttcactttgtaatgagatactgatatgagcaacattaccatttatcacaacccggcctgcggcacgtcgcgtaatacgctggagatgatccgcaacagcggcacagaaccgaccattatccattatctggaaactccgccaacgcgcgatgaactggtcaaactcattgccgatatggggatttccgtacgcgcgctgctgcgtaaaaacgtcgaaccgtatgaggagctgggccttgcggaagataaatttactgacgatcggttaatcgactttatgcttcagcacccgattctgattaatcgcccgattgtggtgacgacgctgggaactcgcctgtgccgcccttcagaagtggtgctggaaattctgccagatgcgcaaaaaggcgcattcaccaaggaagatggcgagaaagtggttgatgaagcgggtaagcgcctgaaataaagcggctatatcccccccacaggttgttagaaaagtgcgctttatttatgtcggatgcgacgctaacgcgtcttatccgatctacaaagtcatgaaaattcaataaattgtatgttatttgtaggcctgacaggcgtagcgcatcaggcgattttgctatttacacattactccctgcgtgagattccaattatcgcgtccagcatggtgtatcagtgagctgcttagtgatcagcgatacagtgcagcagtttaaagacgtactggattatgatttatcagtgctttacacaacaaattattcaataattataagataccttaacccattttattattacacatctaaaacatcacaaaaatatcatttcacacactatcggagaacatcataactttttaaaatgagcgctttttgatagttgttaacgttttcctttacgatactatcaatgcccttttttatacacgaatattaccgggtggagataaaagggaagtcaaaggtaattatatcaggaagatatgnnnntgtgatatttattgtgcgtagaagaaaatccattcctactttaattatccaatttaaaaatcttagcataaaacagataatgaataaggaatgttatgtcaattgactttaccccaggtatgataaatacatatcacggcgatatttataaccgcacaacagataccgacaatgttaaaacaccagacacaccgatgtggccttgtgataatcgggaagaacaacaacccattaattccacattctctggagaaggatacaaccctgaacaatatgatttagcgcggcaacacctcccacaaatttatgcgtgccgcacgaacaccaaatatacagatgcagactactcaaaagttgtggctcaacttgtaagtcttattactaacattgaatcgataagttcgacaccacttacgcggcaggcacaggaaatacttaatcaaattaataacattagatacgaaaagaacaaaagtgctgaatgtcgaatcattgttgtcgctaatcctaaacccgacaaggcaatcataactaaaattagcgtagaagagggaataccagtaagattcagtgtccaaaccatgttttcagatactaattttattgctgaacaacgagctgacttaccgactaatataaaagatattcaaagcctgtatcaaaaaatgacgaagttatatattgagcacagtgaaaataaaaacaggatgaaagtctttgccggaaccaactttattgatttcaatatgacaggacagaacctgtccgggttcgttctaaccttgtcaaggttttatttcgaagatctacttaatataaatttcactgacgcaaatttaggtgacactattttttcacataaagaacaccctactccaaaattatataaagacgaacaatatcttgacaaacaaatcgaaggtttattttcaacattattaaccattaatgacaactttttacgagcaaaagcggaaattgcttcgacaataattaaatttttagaggccaggataaccaatctttcatacaacgacatattgaaatatcagcaagaattccaaaaagaatgttataagcaagttaaatcctttacgacactctctcgatacaataaaattcaaacatgggcagaaatgtctgaatatcaattcgaagtatttcaatacgagacgcttaaccccaaaaaaatgtcacgcacgccttatttaaagaggccacttcctaatgaaaaagatataaattatggggtggaaatagaaataccatctggcaaaagaattcgcttatcaaatcattatcagaatataataccataatattgattattagcactttataatcattgaataaaaatagattttatgtaattttaaaacaaagggttatattatggggcgatggatactcatgccacgccccaaaataacggaattgaactaaacagaagggatataaacatcagacaggtttacgttactatcaggcatatcgcctcagaatcagatgaaaactataaagaaatatctattatggttttaatatttgttgataaggatagtaacatgaacatgacaaaaggtgcactcatactcagcctttcatttttgcttgcagcatgtagttcaattccgcaaaatatcaaaggaaataaccaacctgatattcaaaaaagttttgttgctgttcataaccagccggggttatatgttggtcaacaagcgngctttggtgggaaggttatcaacgttatcaatggcaaaacggatacgttgttagaaatcgctgtattaccgttggatagctatgcgaagcctgatattgaagccaactatcagggccgactgctcgccagacaaagcggcttccttgatccagtgaactatcgtaatcactttgttaccatcctcggcaccattcagggtgaacaacctggctttatcaataaagtcccgtataacttcctggaagtgaatatgcagggcatccaggtgtggcatttgagagaagtggttaataccacctataacctgtgggattacggctatggtgcattctggccggaaccgggctggggtgcgccttactacaccaatgcggtgagtcaggtaacacctgagctggtcaaataacaccaccgaaagatgcagatgctttctcagcatctgcatcatgcattacatcaaattaatacacagtaagctaactattattattataagccctgtcctgttaattacctttggcaaactgattataaagttaatgtccgcaccaggantcggttatgtttcttataattaccagggatacgatgttcttcaccgcgatgaaaaacattctgagtaaaggtaatgtcgttcatatacagaacgaagaagagatcgacgtaatgttgcatcagaatgccttcgtcattattgatacattaatgaataatgtatttcattctaattttctcactcaaattgaacgattaaaacctgtccatgtcattattttctccccctttaatattaaacgctgcctggggaaagtgccggtgacctttgttccgcggactatcactatcattgattttgtcgcactcatcaatggcagttactgctctgtgcctgaagcgaatgtgtcactttcgcgcaagcaacatcaggttctgagctgcattgcgaatcaaatgacaacggaagatattctggagaaactgaaaatatcgctaaaaacgttctactgccataaacacaatatcatgatgatcctcaatcttaagcggatcaatgagctggtacgccatcagcatattgattatctggtgtgaacgattgatcaatataaagaggcccagcaataaatagccagacctcccgttaattatacgttatgcagcaacgccttccggtatcagcgaagcaatttgcttacgccattgcgcttgctcctgttcgccttctgtacgttgaccataaagttgcgctatctgcgtaccatcatgggcaaacaattccagactggttacgtagccatcgctggtcggtttacgggtaacccaggcttcagcaatgctctcttctaatagatgaagagtaaacgtcgggttgaaaatattcagccaacctttcattggcaccactttttctaccacnccggtgaaaatctgtacgcagccacggttgccaacaaacaccatgatttcattaccatcctgctgtgcagattcaagaatttgcgccaacgcactgttggatactttgcaggccaaatcgtctgccaccagattgaacgcctgttggcgcgtcaggttgtggcgcttgagcaacgtaaaaaactgatgaacgtcggtcatcgcccgccactcttgctcgaccacagtggcatcggctcgcgtttgaacaactggcgcatcaacggcttttaactcaagcggcgtattctcatcggtgataaaccgtgccagaagctcactccatgccgccatatcggtattgtcggtggcataaacttttagtaatgcatcgccctgatgatcaaagaactgaatactctggcgttcgccacgagccgtgttttctttgatgtggaaaacactggcccattgattgagaaacagacgtaaatccagcgngcgnnnnttgaggatcaatccggcatgtccgttcaaatgctggtttatgaacgtaccaacttgctcatggactgcatattcattacgacaaatacatttggtttcgccaacactttcgagcgccgccagaatttcacggatatcgccgtgcatccgccacgcatcgtgcgtgacgcgtgcaaatgccagttctgcttctctaatattcattaaccctgcgatgtcacgcgcgtactttccgggattttgttcttttaactcaagccagcgtgtgtagtggttcattgtctctcttccttccagataaatgccccgaaatatcggggcagatgattaccattgataactcacgaaaatttttccgttacgaccatcctgtgggatgccttgcggcgaccagtactctttgtcgaaagcgttacccaacaccaaagtagtggtcatacctttgagcgcctgttgtccttgataactgacgtagaaatcattcacgccatagcctggttgtttgctgtaactgctgctgatatgtgttgagcaatcggcaaacgtaccaacccacccaacagagaagccactgtgagcgatcggaatattcagagtgctggtaacagtatccgggttaatgctggagatgtattcgccggtatcggtgtctttgccgcgggtacggttataggccacatcaaggctaaacagatcagtggtatatttcgtcatcacatcccagccccagattttggcgttcgggacgttatacgacatagtcgtcgccgccgcgaaatcgacggtcgtggagatgtaatccttcgctttggtatcaaagtagctggctttaaattccagagcatcattggacaacatcaggtcatcaaaacgcagcccaaaaccgtactcctgagtttcgttagtttccggacgtaagttcgggtttggcacccaatagttggtatagaagcgaccaatcgagaagtgcttagaatcgttatacatttcgcccatcgtcggggcgcggaatgcctgggcatatgagccaaataacatcagccagttagtcggattgatagtcatccccgcacgagatgaccatttgtcggcatcaacatctttgtaaccgtcactgctaccgcgataactgtcatagcgggttccgccaagcagggtaatcggcagatcgcgtaaggtgatctcatcctgtagccagccggagctaaaatcgatttttgcttgcgggaagcccgtcgtcgcgccgcccggatgttgttcctgacgataatactcaccgccatatgtcagtaagtgagaagcgaaactgtcggcaaagagagtggaacggttctccagcctggctccttttgttatctgttcacgatactcgccggaactccccgtgttttgcgcattaatacggacttccgaccaataaatttttgcatctgcatttaaccagtcgttgccctgcggggcgagtttataagaaagctgcgcatcgcgttgaattgttgaacgatcaaccatcgggttgctgctttcagaagcctcaacggtctgcggattttttggttcacgcgcgtcgttgttgtagtaacgcactaaaccgctcagagactgggctgaatcaatttgccaggtccctttcgccagcatgttattaatggactcgtcattcggcgcggtttcaccattgctctggcgtaaatcaccccgatcgcgactggaccaggccacaataccatccagattttcagttcgcccaaacgcgctcgcgcctaatcccaggctatggtcccccgtgccgccagtaccaaagacacgaaaaccactgctttgtccttcctgcaataaatcttttgcatcgaccgtatcgtaggagatcactccacccagcgcgccactgccatacagtaatgctgaaggtccacgaacaatctcaacacgcttgatcagcgccggatcgagaaaagtgccattcaggtgtccggtatccgttccctgacgaacaccatcgacaagaaccagcacgccgcgatgatcatagccacgcatatttacatcctgaccgttggttcgtccggtaccatccagagtaattccaggaacatgacgcagcagatcggtggctgaagtagccgtttgattttcaggagcggaagtgtcgatgacgctgaccatcataggcgcttcgaaggaactacgggcattccccgttgccgtaacggtcatggtttcagtagcaaaagcaaacgttggcaaggtggcagaaacagctaaggccaataaactcaaacgcaacgaggtaaattgcggacgtgacatancgattctccatgaggaaaataaaaaatgctggctgcctgggttaataccggggtggctggcgaaaaanaaatttatttaaaattcagagcgataatattcgccgggtgagtttacaagcgtttatatcccatgaaattgcctgataactcggcaattacgcaaaagcacgccctctttgtcaggcaaaacgatatgccccatcaggagtgaagagagctgtgcgttatcccttgcaaatgctatggttttgttatccatatggtcgtgttttgttaaatgcaaacgtgataatgagaattattatcgatcaattttttatgatcaagtttttttttaaccaccattaacacaataaacagggggttatgaaacctatcctgcgccctgtaaaccaccttgtttttatggttatccccccatgcctcatcactaaattttgtcgttaacagtgataattttttcttctctttgctctgcaagcctcgatatctctgggttctcagctttttcccgcgatgaaatttagtcggtaacaagaacgttagctgacgaagcatcttgataaaaatcaaaaataaatacgcttgtaacgccttgcgtattgaatcgacggttgtatttcatatataactcaaatgataatcatgatcattctcaatttgataagagttctcatattatgccaaggatcatcaccaggccgtttcttttttccccactgacgttatgtatttcagccgtggcctctgccgcgaagaccgcagtaaaacgtaaaaaattgtttacggcagtactggctcttagctgggcttttagcgtaacggctgccgaacgtatcgtggtcgcaggaggatcgctgacggagctaatctacgcgatgggcgctggcgaacgcgtggttggtgtcgatgaaacgacatcttatccaccagaaaccgccaaactgccgcatattggctactggaaacaactcagcagcgaaggcattttgtcacttcgcccggatagcgtaattacctggcaggatgccgggccacaaattgtgctcgaccaactacgagcgcagaaagtcaacgtcgtcaccctgccgcgtgtgcctgccacccttcagcagatgtacgccaacattcgccaactggcaaaaacgctacaggttcctgaacaaggcgaggcgctggtgacacaaatcagccaacgcctggagcgagtacagcaaaacgtggcgaccaaaaaagccccggttaaagccatgtttattctctccgcaggcggaagtgcgccacaagttgccggtaaaggcagcgtcgcggacgccattctttcgcttgccggagcagaaaacgtcgctacccaccagcagtacaaaagctacagtgcagaatcactgattgcggctaatccagaagtgattgtcgtaacctcacaaatggtcgatggcgatattaatcggctacgttctattgctggaattacccacactgccgcatggaaaaaccagcgcattatcaccgttgatcaaaacctgattctgggaatgggtccgcgtattgctgatgtcgttgagtctttacaccagcagctttggccgcaataaatggatttaaatcagacgaatgaacgcaaataacaccctggatctcacgccacattttgctttagacggtgatcagccatttaaagacaggcgcgccatgatgccgtttcgtggagccattccggttgccaaagagcaactggcacagacctggcaagagatgatcaatcaaacggcatcacctcgtaagcgactggtttacctacacattcctttttgtgcgacacactgcacgttttgtggtttttatcagaaccgttttaatgaagatgcgtgtgctcattataccgacgccctgattcgtgaaatagaaatggaagcggacagcgtattgcatcagtctgcccccatccacgcggtctatttcggtggcggtacgccttccgcactttcggcacacgatttggccagaatcatcaccacattacgagaaaagctgccactggcccctgattgtgaaatcactatcgaaggacgggtattgaattttgacgctgagcgaatcgatgcttgccttgatgcaggagcaaaccgcttctcaattggtatccagtcgtttaacagcaaaatccgcaagaaaatggcccgcacctcggatggcccaaccgctattgcgtttatggaaagcctggtcaaacgtgaccgtgctgcggtggtctgtgacctgctgtttggcctgccgggtcaggatgcgcaaacctggggagaagatctggctattgcccgcgatatcggtctcgacggcgtcgatctctatgcgctcaatgtcctgtccaatacaccgctgggcaaggccgtggaaaatgggcgtactaccgtaccctcaccggcagaacgtcgcgatctttatctgcaaggatgtgattttatggacgatgccggttggcgctgcatcagtaacagccactggggccgtaccacacgcgaacgcaatctctataacctgctgattaaacaaggtgccgattgtctggcctttggttccggagccggcggttcgattaatggttactcctggatgaacgaacgcaatcttcagacctggcatgaatccgtcgcggcaggcaaaaaaccgctgatgttgatcatgcgtaacgccgaacgtaatgcgcaatggcgtcataccttgcagtcaggtgttgaaacagcgcgcgtaccgctggatgaacttacgccacatgccgaaaaactcgcgccgttactggctcaatggcaccaaaaaggcttaagtcgcgatgcttcaacttgcctgcggctgactaatgaaggtcgtttctgggcaagcaatattttgcagtctcttaatgaactaattcaggtacttaatgcgccagcgattatgcgtgaaaaaccataacaggagtgatttatgagccatgtctcgttacaagaatttttgaaaacggagccggacggtacgctggaggtggtagccgaacaatacaacaccacactgctggaggtagtgagaaatctaccctcctctaccgtagtgccaggcgataaattcgatactgtctgggataccgtctgcgaatggggcaacgtcaccacgttagtacatactgccgatgtaatcctcgaatttagcggcgaactgccttcgggtttccatcgccacggctatttcaacctacgcggaaagcacggcatgtccgggcatatcaaagcagaaaactgcacgcatattgccttaatcgaacgtaaatttatgggcatggacaccgcgtccattctctttttcaacaaagaaggcagcgccatgctgaaaatcttcctcggcagggatgaccatcgtcagctcctgagcgaacaagtcagcgccttccatactctggcggcatcgttaaaggaacacgcctgatgacgccgtggctactctttggcgcaggcggaaaaggtgtgggtgccagaacgcttgaactggcgctggcggaacaacgtccggtcgttgctgtcattcgtcatgccgatgccgccacgaaactggcgcaacaaggcgtacaggtttttacaggcgacgcctgtgatgccagcgtagtcgcggctgcttgccgcgcagctggcccggatgcgcttatcatctcaacaatgggaggagctcaggattatctggcgcacagaacagtgattgatgaggccgaaaaggccggcatcagtcgcatgattctggtgacctctttgggatgcggcgatagctggccgtttttatcggagcgggcaaaggctgcgtttggtcaggcggtacgggaaaaaacgctggcggaaagctggctgcaaaccagccagctagactacgccattctccgccctggtggtctgcttgacggcgcagcaacaggcaaagcacaacggatacaaaatcaggagtgtcatggttttgtccgccgtgccgatgtcgccgcacatatccatgaactggcaaatgcgccagcacttaaccagcaggtctacagtctgattgaaccggacctgaaaccggcgtgataccccggcgcggcatgtccgcgccgtaatgtcgtaacggagttttgcgtgctcaaggattcattttcatccgccagggtctttatggggctatcactattattgcttgccctggtgctgttcggtgctagtcagggagcgttaaagatcagttttgatgccctttttgatgaggaataccgcgatatctggctcaatattcgtctaccacgggttttgctggcggtgctggtaggtgcagcgttggcaaccgcaggggtaattatgcaggggctttttcgcaacccaatggctgacccaggattactcggcgtcagtagcggttctgcattaatggttggcgttgcaattgtgctgcccttctccttcccagtggtgctggtgctctatgagcaaatggtgtttgccattgccggaagtttagtagtctgcgccatcatttttctcatcacgcagcgccatcgcgatggcagcatgatgcaattattactcgccggtatcgccatcaatgccctgtgcggcgcagcgatcggcatcctgagctatattggcgatgagcagcagctacgacaactcacattgtggatgatgggcaatcttggacaggcgcaatggccgacgttattggttgccagttcattcatccttccggccattatcgcaacaacttgtctcgccggaacgctgaatttactgcagctcggtgatgaagaagcccattacctcggcgtgaacgttaagcgtaaacgccagcaattactattagtgagctcactgctcgttggtgctgccgtatcggtaagcggcattatcggctttattggcctggtgatcccgcatctgattcgcatgactaccggagcaaatcaccgctggctcatcccttgttccgccctcgccggagcctgtttattgctgatggcagacacgcttgcccgcacgctggtacagccagcagaaatgcccgtgggattattaaccagcctgcttggtggcccttattttatgtggttgattctgcgaaatcggaggatcacatgatcagcgcccagaatcnggtttatagccttcaggggcggcgtctgactgataatgtctcgctgacttttcccggtggggaaattgttgccattctcggccctaatggtgcgggaaaatctacgctgcttcgccagttaaccggctatcttcaacctgatagcggcgaatgtcggttgtttaataagccattaaatgaatggtcgattactgaactggcgaaacaccgggccgtgatgcgtcaaaatagccacatggcgtttccattcagcgtacaagaagttatccagatgggtcggcatccgcatcgtactggtaatcaggataatgaaacagcacaaataatggcgttatgtgactgtcaggcgttagcaaaccgcgactatcggcaattatccggtggtgaacaacagcgcgtgcaattagcgcgcctgctggtgcaactctgggaacctactccctcaccgaaatggttatttcttgatgaaccaacttcggcgctggatattcaccatcagcagcacttgtttcgtttattacgccagttagttcacgagcggcagttcaatgtctgctgcatattgcacgatctaaatcttgccgcgcgttatgcagaccgtgttgtattaatgcaaaaaggaaaggttatcgcaaatggtaaaccacaggacgtattgacacagcaggcgctgacaatgctctacggcgcggatattaccgtacttaaagatcctgccaaccattcaccactgatcgtcctcgatcattaaaagcaacaggagtaccgcactggtactcctgcgaataaataactatacagattagctaattgaaacgcctttcacccctgccataccttttaataatcgcaacagatcttctatcgacgttgtggcatgaagctggatatcaatggcgaccacttcatgatcttcattttcctgcaacgaaactaaatcagtttttattttttgctgcttaaaccagtcgagcattgataccgtattaccgttcactaatgtcagctgtaaatggtaatttttgttcatcaggcggaaggttaattgatggaagacttccagcaccagcaaggtcatcactgaaccataaatacccagttcgtacataccactgccaataaccatacctatggcggcggtcacccagatatccgctgccgtcgtcaaacctacaatattttggttacgaacgagaatgttacctgcaccgataaacccgacgcccgtcaccacctgagcagcaatacggctggggtccagtccgacgtgatctaaagacagcacgtcagcaaaaccatatttcgaaacaatcataaacagtgcgcttcccatgccaattaatacatgagtgcgtaaccctgctcctttgccgcgcatttgcctttccatgccaatagcgccacaggcaattgccgcgagtataagacgtataataaattctgctgtcatataaaaatgcaaaaaggagcagcaagatggctcaacttgccactcctttttacttgtacctcattaattcggcaagtcattagatgcttgatttttgaaggtatacaaatttttctgcgggtttttcttacagtattcgatcactttaggaatttgagtgagatcggtttcatttaaagtaactgtatcgccacctttatatactgtttcttcatgcagcatccaccatgcaaccggggtcattgcttttggattcagatcaataaattcctggcaggtcatatctttagcggattcattggctgccagcgcagattgtgcgttcaccagtgacaaagccgctacagcgcccataaaaataaacgctttacggagagatgaaatattcattttgtaacccattcaatatagagattatatatgaacaggaggaatagctgcttttaaagaagatattccggcctgttcaatatgcaaggaagtacgatgtaacgcattcccggaattacatatctttcttaattttgtcccattcgcctttaactttatctttaaagttggcttgtttatcctgagtacaagcctgaacgatagctggggttacggttgcaataccctgaacatctaaaaccgcatcttctggtttatctttgttgttcagcgcttcagcaaaaccaactgcagttggctggaaggattcgtccacagccaggaaatcttcacaggtccaggagttgaccggttttttgttatcagctgctttttgcgcatccgctgcattgctcacaactggcagaagaagcagaccaccaagaataacgcctaatacttttttcatcgtaatatcctcaactataaagtgaaagagccgtcacgaatcaatttcgacactgaggttataacctggttttctgtatatgtcatgttgatggaaaatatcaaaatcagatatttttatttcaatacaatgagttacagatgcatcagatactgcaattaggaaatttttattaaatcgactgcattcttagacgcgtttttggcatagattgatagcaggggattttcttcttaattttatagggtggttctatgttatatatagataaggcaacaattttgaagtttgatctggagatgctgaaaaagcatcgcagagcaatccagtttattgccgtgctgctgtttatcgtcgggttgctgtgtatcagtttcccgttcgtttctggcgatattttaagcacagtagtaggtgcattattaatctgttcgggcattgcgcttattgttggattattcagcaaccgcagtcataatttctggccggtattatccggtttcctcgtcgcagtcgcctatttaatgatcggctatttcttcatccgcgcaccggagctgggcatttttgccattgcggcatttattgccggtttgttctgtgttgcaggggttattcgcctgatgagttggtatcgtcagcgttcaatgaaaggcagctggctacagctcgttattggtgtgctggatatcgtcattgcctggatattccttggtgcaacgccgatggtgtctgtaacgctggtttccacactggtgggaattgaactgatatttagcgccgccagcctgttcagcttcgccagtttgttcgttaagcagcaataattatcccggttgtcacccggatcatagtcacttgatgtgactatgatccgattaatactctctccgctacgcagtgttgtagatcaattgcgcactatcattgaaataattacctgctagtgattatttcaacctactgaatttcatctaatttttttcactccatggcaaattagccatttcaaacattatcatggctgatattttccgtagtcaggtttaatgttttaaaagtgctgtgggaaagtgaacaaagagttccgtaagcgttgatgctatgggcggttaaataagtaatccgggttcatttttttgcaactggcgttgattacattgcataaatatccatgtctccagacgctatataaaaacctgaagacatgaatgcgttatttactcaggtaatttcaatgcgttaaaagaaagctggcaatccaattgccagcttaagtcgaaacaaggagactcgatatttaaatcggattactttttaactttagtaatattcttcagagatcacaaactggttattgataacttattcttgggcagtaatccgcaaacgttaactttttgtttactatttacaagctgataacaaccaggaatcttacttaggatcaatatatggagtgcgtgatggataaatctgaagtattgattagtgttaatagacgtattagttcacgaagagcaaagttcttataggcgtttactatattgaacaacgattcggacaaggatgtaaataatgaaaaggatgacatgttcgaaacgataacggctaaggagcaagttatgatttttctcatgacgaaagattcttttcttttacagggcttttggcagttgaaagataatcacgaaatgataaaaatcaattccctgtcagagatcaaaaaagtaggcaataaacccttcaaggttatcattgatacctatcacaatcatatccttgatgaagaagcgattaaatttctggagaaattagatgccgagagaattattgttttggcaccttatcacatcagtaaactaaaagctaaagcgcctatttattttgttagccgcaaagaaagtatcaaaaatcttcttgagattacttatggtaaacacttgccccataagaattcacaattatgtttttcacataatcagttcaaaattatgcaactgattctgaaaaataaaaatgaaagcaatatcacgtcgacgctcaatatttcgcaacaaacattaaagattcagaaattcaacattatgtacaagctgaaactaagacgtatgagcgacatcgtcaccctgggtatcacatcttatttttagtcaggacataagcaactgaaattgatggctggcatgacgagggatgcagatgctgatttcattacccccggtgattactaaaggagaggctaaaacgactttattcccctggtatgtgtatccaccagtagaacccttcgttgcccgaatgctggcaggaactgttggcagaacggcaacattttttttgtcgttgacctcaccatgtcgatcactatgcctgtatcccaccttactggctgacaaccccactatgccgctggtctgtaaatccctcatatctctcctcgcgcgcaatttaaagaaccgttatttctcaagaattttcagggactaaaatgaacagaagaagaaagctgttaataccgttgttattctgcggcgcgatgctcaccgcctgcgatgacaaatcggcggaaaacaccgccgccatgacgcctgaggtcggtgtcgtcacactctcccctgggtcggtcaatgtgttgagcgaattgcccggtagaaccgttccttatgaagttgccgagatacgtccccaggtgggcggtattatcattaaacgcaactttatcgaaggcgataaagtgaaccagggcgattcgctgtatcagattgatcctgcacctttacaggccgagctaaactccgccaaaggctcgctggcgaaagcgctctctaccgccagcaatgcccgcatcacctttaaccgccaggcatcgttgctgaagaccaactacgttagccgtcaggattacgacaccgcgcgcacccagttgaatgaagcagaagccaatgtcaccgtcgccaaagcggctgttgaacaggcgacgatcaatctgcaatacgcgaatgtcacctcgccgattacgggcgtcagcgggaaatcgtcggtgaccgtcggcgcactcgttaccgctaatcaggcagattcgctggttaccgtacaacgtctggacccgatttatgtcgatctcacgcagtcggtgcaagatttcttacgcatgaaagaagaggtcgccagtgggcaaatcaaacaggttcagggcagtacgccagtacagctcaatctggaaaatggtaaacgttacagccagaccggcacgctgaaattctccgacccgacggttgatgaaaccacgggctccgtgacgttacgggcgattttccccaacccaaatggtgacttgctgcctggcatgtatgtcacggcattagtggatgaaggtagccgccagaatgtattactggtgccgcaggaaggcgtcacccacaacgcccaaggtaaagcaacggcgctcattctggataaagacgatgtcgtgcagctacgcgaaattgaagccagcaaagccatcggcgaccagtgggttgtcacctctggcttgcaggctggcgatcgggtgatcgtttccggtttgcaacgcattcgtccgggtatcaaagcacgagcaatttcctccagccaggaaaacgccagcaccgaatcgaaacaataacgttgcaggcttaaggggactttcatggctaactattttattgatcgcccggtttttgcctgggtacttgccattattatgatgcttgcaggtggtctggcgatcatgaacttaccggttgcgcagtatccgcagattgcgccaccgaccattaccgtcagcgctacctatccgggtgccgatgcgcaaacggtagaagactcggtcactcaggtgattgagcaaaatatgaatgggcttgatggcctgatgtacatgtcttcaaccagtgatgcggcgggtaatgcctctatcactctgaccttcgagactgggacatctcctgatatcgcacaggttcaggtgcaaaataaactgcaactcgctatgccttcattacctgaagcagtgcagcagcaggggattagcgtcgataaatcgagcagtaatatcctgatggtagcggcgtttatttctgataacggcagcctcaaccagtacgatatcgcggactatgtagcgtctaatatcaaagacccgctaagccgtaccgcgggcgttggtagcgtacagctctttggttccgagtacgccatgcgtatctggctggacccgcaaaaactcaataaatacaatctggtaccttccgatgttatttcccagattaaggtgcaaaacaaccagatttctggtggtcaactgggtggcatgccacaggcggcagaccagcaactaaacgcctcgatcattgtgcagacgcgtctgcaaacgccggaagaatttggcaaaatcctgttgaaagttcagcaagatggttcgcaagtgctgctgcgtgatgtcgcccgcgtcgaacttggggcggaagattattccaccgtggcgcgctataacggcaaacctgctgccgggatcgccatcaaactggctaccggagcaaacgccctggatacctcgcgggcagtcaaagaggaactgaaccgcttatcagcctatttcccggcaagtctgaagacggtttatccttacgacaccacgccgtttatcgaaatttctattcaggaagttttcaaaacactggttgaggctatcatcntcgtcttcctggtcatgtatctgtttttgcagaatttccgtgccacaatcatcccgacgattgccgtaccggtggttattctcgggacgtttgcgatcttgtcggcggtcggtttcaccatcaacacgttgactatgttcgggatggtgctggcgatagggttactggtggatgacgccatcgtggtggtggagaacgtcgagcgtgtcattgcggaagataagctaccaccgaaggaagcgacgcataaatcgatggggcagatccaacgtgcgctggtcggtattgccgttgttctttccgcagtgtttatgccgatggcctttatgagcggtgcaaccggggagatctaccgccagttctccatcacgctgatctcctccatgctgctttcagtatttgtggcaatgagcctgacccctgccctgtgcgccaccattctgaaagccgcgccggaaggcggtcacaaacctaatgccctgttcgcacgcttcaacacgctgtttgaaaaatcaactcagcactataccgatagcacccgctcactgttgcgttgtaccggtcgctacatggtgatctacctgctgatttgcgccgggatggcggtgctgttcctgcgcacgccgacctctttcttaccagaagaggatcagggggtatttatgaccaccgcgcagttaccttccggtgccaccatggttaacaccacgaaagtgctgcaacaggtgacggattattatcttacaaaagagaaagataatgttcagtcggtgtttaccgttggcggctttggcttcagcggccaggggcaaaacaacggtctggcgtttatcagtctcaagccgtggtctgaacgtgtcggtgaggaaaactcggttaccgcgatcattcagcgggcaatgattgcgctaagcagtatcaataaagccgtcgtcttcccgttcaacttacccgcggtggctgaactgggtaccgcgtcaggttttgatatggaactgctggacaacggtaacctggggcacgaaaaactaacccaggcacgaaacgagctgttatcactggcagcgcaatcaccgaatcaggtcaccggggtacgcccgaacggcctggaagatacgccgatgttcaaagtgaacgtcaacgccgcgaaagctgaggcaatgggtgtggcgctgtctgatatcaaccagacaatttccaccgccttcggcagcagctacgtgaacgacttcctcaaccaggggcgggtgaaaaaagtgtatgtccaggcaggcacgccgttccgtatgttgccggataacatcaaccaatggtatgtacgcaacgcctctggcacgatggcaccgctttctgcctactcgtctaccgaatggacctatggttcaccgcgactggaacgctacaacggcatcccgtcaatggagattttaggtgaagcggcggccgggaaaagtaccggtgacgccatgaaatttatggcagacctggtcgctaaacttccggcaggcgtcggctactcatggaccggactgtcgtatcaggaagcgttatcctcaaatcaggctcctgcgctgtatgcgatttcactggtcgtggtgttcctcgccctcgccgcactttatgagagctggtcaattccgttctcggtgatgttggttgttccgttaggcgtcgttggcgcattactggccaccgatctgcgcggcttaagtaatgacgtctacttccaggttggtttgctgaccaccatcgggctttccgccaagaacgccatcctgattgtcgaatttgccgttgagatgatgcagaaagaagggaaaacgccgatagaggcaatcatcgaagcggcgcggatgcgtttacgcccaatcctgatgacctctctggcctttattctcggcgtgctgccgctggttatcagtcatggtgccggttctggcgcgcaaaacgcggtaggtaccggcgtgatgggcgggatgtttgccgcaacagtgctggcaatttactttgttccggtctttttcgttgtagtggaacatctctttgcccgctttaaaaaagcgtaacgtgtaaatgagagtaaggttgaacgtgaaggttcagccttactctttcctgctaaccattcaccactcaacaaccagctaaccgtcaggaataccaggcttagtacacagcactgaaagtagaaaccactccagccattcgtcatcaatttgaacagcacaatactgacccacattcccgtaatcgtatgaattgtcagcttaataatcccaaacatgccgagtcttttcctcctgaaaatacctataccgcctggcaaactgcgaaagagaactagccggtagcccggcagaaatcatcagggaagagtttcacatgaagcaggtgtgagatcctgaccaatattcaaatgcaaaatatgtcaggaaaaggtacctggcgaatgttgcgcaaactgatgtggcgttacaccataatattgtcgaaatgtgtttataaagtacgacgtactgctatagccacatttttccgcaatagtatgcagaggaatttgacgtaactcgagtaatcgtctggccatcgacatcctggaggcgagtaatattttactgaaacaggtgttttcatcctgcaacttttttttgatgagactctcgctggtatacattctttccgcgatatcgcgcagataccaacgtttggcgatatcaaagctaataaggcgttcaacttttcctgaaacagtgctgatgctattgaaaagtaaggggatcagttctttcttatgagaaaacatcgataaacaggaaaggtagagcatattgctcagtatcggtgaatttaccccggattcattgaagctatcaaaaatcgccgtcaccagcggcatggggggtgactggttaattaacagacggtctttgctatgtaaccctaaattgcgtggtagctgacgaatattttgtaagtaatggcaaactgtcagctcatcgatatccagtcgtcgcgtatccggtgaacaaaacgcaaaatcgtctgccaaatttttctccagcagcaggatactctcgttatgcagcgatattttttgctgttcatgataaatatcgaatgaacgacgaatgaggatcaccgagcagacatgagtcatgattatcccttatatttcatactgcgattatttcaatttcagtatactaatgaaatgatgccagactgtttcttagcgcaaaaactgccaaannnggtaggaccaaaatttatccacaaagtagttttgcataacagttaattgataataagtaaatgcaacacgaatatattttcgcacagcgtatagcttatgtttataaanannnngctgatcttatttccagtaaaagttatatttaacttactgagagcacaaagtttcccgtgccaacagggagtgttataacggtttattagtctggagacggcagactatcctcttcccggtcccctatgccgggttttttttatgtctgagtaaaactctataatcttattccttccgcagaacagtcagtgccgtaaaaattcccttgcgcaacaatacttgccgccgagtcacggttcggcaatccctgcgccgatcgctcctgatactctgtgggcgtcatcccataataatttcgaaagacgtaaatgaaatacgacacgctgtgatatccacaggacactgcgactcgcttaattgaaangccatgtataacaataagttgcaaagcacgttgcattctacactcagtaagcaactgtgaatatgatgtctcttcttcgcgcaattttttctttaacagacttggactcatcaacagctcgctggcgattcgggctagtgtccactcatgagcgatattattattgataaccgtacaaactcgtgttcgcatgttcggttgtaaaacgttcagaagcagcggtataaagtgatcatcctcaagaaaaacagataacaacgcaaagattaatgctcttttacgtagcatttctgcatagcgaagattcttattctgcgatagttgnnnaacttcctgaaaaacaggaatatctctgctacagtgatgaacgagtaatgaagaaacttttttatgtgcatgaagatttaatgcctcctccttgagcatcgggagaaataatgaaagcgtatcccttgatactaatacaaaattttcaacacacttatctactcgaatttggcttgcatccgcaaaaaccaggtcaccgccattaaaatagcgatattcaccattaaccatggtgagaatatatttatgtcttgcgtacgcaattagacaattcccatgtaatgattgcatagttgacttaatattacataaacatattactgtttattaatgtagcacgccgccctcttaagtcaaattgattgataaataaatttaaacgaagcgggagaacaggatgataatgtgtgatgttctacgggcaggatgactggatttataatacaaaaacgtgtttaagaacgcagggaaattaatagtaagcaaataatcccttgtcgtgacattaaaggtaatcgctacatttaataaacattcatataacatatatcttatcaacacgatgaatagacagccaatatattattgcgattaataagcaaccgaatgcccagctgttttttttaaaggctgggcattcggtttttacaacgttatgttatcaggtgtgtttaaagctgttctgctgggcaataccctgcagtttcgggtgatcgctgagatatttcagggaggctttgtagtcttccagcaacagttcagcaaagtccatttcgaagccgcgacgacacataatgcgcatcaccacgatgtcggtggcttcaccgccgagagtgaaggccggaacctgccagccgcgcagacgcagacgttcagagaggtcgtacagggtgtatcccggatcttcaccctctttcagtttgaagcaaaccgccgggatgccttcgtccggacgacccgtacagatgaactcatacggccccagtttggcgatttcatccgccagataagcggcaacctggtaagaggcgttctgtactttggtatagccttcacgaccgaggcgcaggaattcataatactgcgcaatcacctgacccgccgggcgggagaagttgatggcgaaagtaccaatctgaccaccgaggtagtcaacgttgaacaccagttcctgcggcagcgcttcttcatcacgccagataacccagccgcagcccagcggagccagaccgaatttatggcctgaagcactgatcgatttcacacgcggcaggcggaagtcccagacgatatccggggcgacgaacggtgccaggaagccaccgctggcagcgtcgatgtgcatgtcgatgtcgataccggtgtcggcctggaatttatccagtgcatcgtgcagcggttgcgggaactcatagttaccggtgtaggtcacgccgaaagtcggcaccacgccgatggtgttttcgtcgcaggcttcaatcatgcgtttcgggtccataaacaactgaccggggcgcatagggatctcgcgcagctccacatcccagtagcgagcgaatttatgccagcagatttgcaccggaccgcacaccaggtttggtttatccgttggtttgcctgcagcttccatacgcttgcgccaacgccatttcatcgccatcccgccaagcatacaagcctcggaagaaccaatggtgttggtgccaacggcctgaccatttttcggcgcaggcgcatgccacagatcggcaaccatgtttacgcaacgcaggtcgatggctgcggattgcggatattcttctttgtcgatccagtttttattgatcgacaaatccatcaatttatggacgttttcgtcgtcccaggtctggcagaaagtggccaggttctgacgagcgttgccatcaagatataattcatcattgataatctggaatgcgacatcatcgcgcatttcgtgcagcggaaatcgttttgactccgcgatagtagaaatggcctttgcgccaaaacgtgaatcgagtagttctgagcggaaatccgttaacagcttctggtccatttcgaactccttaaatttatttgaaggcaataaaaaagtaggatttatccgcaatggaagcaaggcattacaggcttaatttaaataacaaaatcctaagcagaaaaatgannttttannatataaacatttaatatgataatattaaaaacagactttattatcgtaataaaaatcgcccaaacattcctgttcgggcgatcaaattaattattgtttatcctgcatatacggcgtgtaaaccccgttcagactgtgcaggaaagctacgatatcatccacatcctcctgcggcagctctttgcctacctgatagcgcaacatcagtttcaccgccccgtccagcgtcggcacgtcaccgcgatggaagtacggtgccgttaaagcaacgttacgtaaaccgggtactttctgacgcaatttatcacgctcttctttagtcacattcatacgaccaatatccgccnccgtaatttccccaaagttaaagtcttttttcagccccaacggttcgaaggaacgtccgccgagaataattccaccatgacaagttgcacatttattatctttaaataattgatagccttttttctgttgcgccgtcagcgcattttcatccccacgcaaccatttatcaaatggggaatccggcgtaattaatgttttctcaaattcagcaatggcatcagtaatattttcgccactgaaaccttgcggatagacgtcgaggaactgcgctttaagctgcggatctttttccagcttagcaataatttcgtcccaggattttgacgccatttcaatcgggttcaacggcggtccaccagcctgatcctgcaatgttgccgcacgaccatcccagaactgctcaacgttaaatactgagttaaataccgtcggcgcgttaatcggcccaactgcgccaccaacaccaatcgatgtttttctgccatcgacgccccccgcattcaacgcatggcaatgagcgcatgaaatggtgctatcagccgataaacggggatcgtgatacagcgcaaagcccaacgccactttttgcgcatcggtaggcagtttttgcgggatgggctgcaccggttcattgcgatgctccggagcagtatcattgctggcgtaatattccgcgcgctgttttgcaatccaggccagtatttccgcccgctcttcatcactcaccttacccgcccagtgtagcgcggtataacgcgttggcggcatagtttcatactgcatcacccattcaatcttattcagatcgctttgcgaaacgggtttatcagccagcagagcagcacgcacggcctcgaggttaaaagatttatatccaagcttaatgtcgtaatccatcaactgtttcgcgccaggaatataataataggcgggtaattctgccgaaggcgtgtggcaatagtcgcatcctttttcgcggagaaagcctaaaaccttattattttcactgacagcagatgcctgaacatcggcctgtttactgcgtttattatcgtggtaccacacataaccagataaccctaaatagcaaatcgcgacgccagccaggccgatcgcggtaatacgtgagaccattttcattattcttccctcacggtggtgagttattgtgacccagaaaattttccagaatgctgcaaacgtctctgcgagacaaagccatcataaaaaacagggagatacgctttttgataggaatcaatcaattacatgaatataaactatcaataagatagcctgtgcctattacccagatcaggaatggcatatcatgattgcggcaagagcaggattgaatgttctgaaaatgaaaaacaacacgaaatctgtatttttataaattccattgatattagtgcgttatattttttgacaggttaataaacgtgatccaccgcacgctttgtcgcccaccaggcggagcgaatgactacccttaaagaaaagcccgataattagcgacgaatttcggaggttggatccttatgctcaatcagaaaattcaaaaccctaatccagacgaacggatgatcgaggtcgatctctgctatgaactggacccgtatgaattaaaactggatgagatgatcgaggcagaaccggaacccgagatgattgaagggctgcccgcctctgatgcgctgacgcctgccgatcgctatctcgaactgttcgagcatgttcagtcggcgannnntttccccgacagtaaaacctttcccgactgcgcacccaaaatggacccgctggatattttaatccgctaccgtaaagtgcgccgtcatcgtgattttgacttgcgcaagtttgttgaaaatcacttctggctgccggaggtctactccagcgagtatgtatcggacccgcaaaattccctgaaagagcatatcgaccagctgtggccggtgctaacccgcgaaccacaggatcacattccgtggtcttctctgctggcgctgccgcagtcatatattgtcccgggcggccgttttagcgaaacctactattgggattcctatttcaccatgctggggctggcggaaagtggtcgggaagatttgctgaaatgcatggccgataacttcgcctggatgatcgaaaactacggtcacatccccaacggcaaccgcacctattatttgagccgctcgcaaccaccggtttttgcgctgatggtggagttgtttgaagaagatggtgtacgcggtg

SEQ ID NO: 1540 - DNA, 5815 bp, Escherichia coli
  Strain O55:H7
  modified_base (1212)..(1212): a, c, g or t
  modified_base (5150)..(5150): a, c, g or t
gctatctcgaccacctgaaaatggaatatgccttctggatggacggtgcagaatcgttgatccctaatcaggcctatcgccatgttgtgcggatgccggacggatcgctgctcaaccgttactgggacgatcgcgacacgccgcgtgacgaatcctggcttgaggacgttgaaaccgcgaaacattctggtcgcccgcccaacgaggtgtaccgcgatttacgcgcgggggcggcctccggttgggattactcttcccgttggctccgtgatactggtcgtctggcgagcattcgtaccacccagttcatccccatcgatctgaatgccttcctgtttaaactggagagcgccatcgccaacatctcggcgctgaaaggtgagaaagagacagaagcactgttccgccagaaggccagtgcccgtcgcgatgcggtaaaccgttacctctgggatgatgaaaacggcatctaccgcgattacgactggcgacgcgaacaactggcgctgttttccgctgccgccattgtgccgctctatgtcggtatggcgaaccatgaacaggccgatcgtctggcaaacgccgtgcgcagtcggttactgacacctggcgggattctggcaagcgagtacgaaaccggtgaacagtgggataaacccaacggctgggcaccgttacaatggatggcaattcagggatttaaaatgtatggcgatgaccttctgggcgatgaaatcgcgcgcagctggctgaagacggtgaatcagttttatctggaacagcacaaactgatcgaaaaataccatattgccgatggtgttccccgcgaaggcggcggtggcgagtatccgttgcaggatgggtttggctggactaacggtgtggtacgccgtttaattggtttgtacggcgaaccataatatttttacagccagccgctaacttcctgctggctgtaaaattatcctcttcaggaggagatatttaacatcattgccgcctgggtgcgatttttcacttccagacggcgatacagggattccagatgcgcttttaccgttccggtactgatattcagcgctctgccgatctccttatttgattcgcccgccgctaacatggttaaaatctcccgctggcgggcgcttaacgatttgagatctttaatgtccttttccggcgtcgtccgccagtctccaggcagaaacatcntccccatcgccgcactatttaccgccaacgcaaatgtctcgacggttgaatcacgaggcacaatggccagcacattaaaatggataacttcctgtaaccaccgtttattgcagtccgtcgccgtaattaacaccttaacctcaggaaattgcaccacggttttttgcagcaaccagtagcaaaactcaccatcctgatcgccatcgagcataactaaggcttcagggtaactttccagcttttgccataactcgtctgcctgactggccccctgaatactcactcctggaatacgctgctgtaaactgattttcattccatgaataaatattgactgcctgtcaaacatgactatttgcataactgaatctccacctgaatacgttaaaaagacttaagtagtggaagggtattacccgcgagaaaaaataagaattcgccatttggcggtggccattctacagagatggcgcgtagaaaatagttaccgatataaatagttacagctaaacgcctgaaattacatgtcgagggcactatttaaaacaattttgaggatttccttatattggtggttagtacgcatgcaattaaaaatgaaattccgcgaccacaagccaaaataacaaatggcaatgagacaaaaataagcacaaatagccaatatgtcctctattcactttaaagggaatcgctgaaaaatacgctctgtttaaggggattcacctttctcagaaagctattccgcccttttcctgctgagaaatcgccacattcgtcatgacaacattgtgaaacccggcattagatgttagaaaaaataataaacaatgcgatatgcgcgttactgtttcgctgtgaacaacaatcggtcaaagaaatggataaaattcacgcaatgcagttgttcatcaaagtcgcggagctggaaagtttttcccgcgcagcggatttctttgctttgccaaaaggaagtgtttcgcgccagatacaggcactggaacatcaacttggcacccagcttctccagcgcaccacgcgacgggtcaaactcacgccagaaggcatgacctattatcaacgagcaaaagatgtgttgagtaatctcaacgaactggacggtctgtttcagcaggatgccaccagtatcagcggtaaattacgcatcgacatcccgccaggaatcgcaaaaagcctgttactgccgcacctgtcggaatttctctatcagcatccgggaattgagctggaactgagtagccatgaccgtccggtagatattcttcatgatggttttgattgcgtgatacgcactggcgcgttaccggaagatggcgttatcgcccgtcccctcggcaaactgaccatggtcaactgtgccagtccgcactatctgacgcgctttggttatccgcaaaaccccgacgatctcacttcacacgcaatagtgcgttatacaccgcacctgggtgtacatccgttaggttttgaggttgccagcgttaatggcgtccagtggtttaagtctggcggcatgttgacggtaaacagtagcgaaaactatctcgccgccggtcttgccggtctggggattattcagatcccgcgcattgccgtgcgcgaagccctgcgtgccgggcggcttattgaagtgttgccaggctaccgtgccgagccgctctccctttcgctggtttatccgcagcgtcgggagctttcccggcgtgtaaacctgtttatgcagtggctggctggcgtaatgaaagagtacctggactgaccgactatactttttaagaatgaccacgacagaaggacaaaagagcggatgacgcaggaaaacgagatcaaacgtcccacccaggatctggagcacgagccgattaagcagttggataatagcgagaaaggcggcaaagttagccaggcgctggaaaccgtcaccaccactgccgaaaaagtccaacgccaaccggttattgcgcacctgattcgcgcgacagaacgctttaacgatcggctgggtaaccagtttggtgcggctatcacctatttctcatttttgtcgatgatcccgattttgatggtgtcgtttgccgcagggggctttgtgctggcctcccatccgatgttgctacaggatatcttcgacaaaattctgcaaaacatcagcgatccgacgctagccgctacgttgaaaaacaccatcaacaccgccgttcagcagcgtacgactgtagggcttgtcggcctggcggtggcgctttattccggcatcaactggatgggtaacctgcgtgaagcgattcgtgcccagtcgcgcgatgtctgggaacgctcgccgcaagatcaggagaagttctgggtaaaatatctgcgtgattttatttcgctgattggtttgttgattgcgctgattgtgacgctttcgatcacctcggttgccggttcggcgcagcaaatgattattagcgccctgcacctgaacagcattgagtggctgaaaccgacgtggcggttgattggcctggcgatttccatcttcgccaactatctgcttttcttctggatcttctggcggttgccgcgccaccgtccgcgcaaaaaagccctgattcgcggaacatttctggctgctattggttttgaagtgattaaaatcgtgatgacctacaccctgccatcgttgatgaaatccccctctggcgcagcatttggttccgtgctggggctgatggcatttttctacttcttcgcccgtttgacgctgttttgcgcggcgtggattgccaccgccgaatataaagacgacccgcgaatgccggggaaaacgcagccttaaaataggccggatgcagttcaaaacgccttatccggcatacgaatttattcggcctggctccccgtaggccgaataagatgcgccagcatcgcatccggctataatgcgcacataacctcttgaaactctttcccagagcctcttcagccatctattcaggagcaaacaatttcatgccaactcataaccccagcatataaatccagatggtaacttttatttaacctgaaaccagttttatccactatttataaaattatgtgaagcatttcatagaagaaaaatcactggcctaaacattatcccctttttgcctggtttttgaccatttccgcgatttgttacacattgaaatatcacttttgctgtgcgtaatatggctattcgttagccaaaaaataagaaaagattatgcaagcaacagccacaacactcgaccacgagcaagaatacacgccgatcaactcgcgtaataaagtccttgtcgcctctctcattggcacggccattgagttcttcgacttttacatttacgccactgcggccgttattgtgtttccgcatatcttcttcccgcagggcgatcctacggcagcaacgctacagtcgctcgccaccttcgccatcgccttcgtcgcgcgccccattggctctgccgtttttggtcattttggcgatcgcgttgggcgtaaagcgacgctggtcgcctcgttgctaacgatggggatttcgaccgtggtgattggtctgctgccaggctatgccacgattggtattttcgccccgctgctgctggcgctggctcgatttggtcagggtctgggcttaggtggtgaatggggcggcgcggcgctgctggcgactgaaaacgccccaccgcgcaaacgtgcattgtacggctccttcccgcagctgggcgcaccgattggcttcttctttgccaacggcactttcttgctgctttcctggctactgaccgacgagcagtttatgagctggggctggcgtgtgccatttatcttctcggcggtgctggtcattatcggcctgtatgttcgcgtgtcgctgcatgagtcgccggtgtttgagaaagtcnctaaagcgaaaaaacaggtgaagatcccgctgggtacgctgctgaccaaacatgttcgcgtaaccgtactgggtacgttcattatgctggcaacctatacgctgttttacatcatgacggtctactctatgacctttagtaccgccgccgcgccagttgggcttggcctgccgcgtaacgaagtgttgtggatgttgatgatggcagttattggttttggcgtgatggtgccagtcgctggattactggctgatgcctttggtcgccgtaaaagcatggtaatcatcaccacgctgatcatcctgttcgcgctgttcgcctttaacccactgctcggttctggcaacccgattctggtttttgccttcctgctgctggggttaagtctgatgggtctgaccttcgggccaatgggtgcgctgttaccagagctgtttccgacagaagtgcgttacaccggagcatcgttctcttacaacgtagcgtcgattctcggggcttccgttgcgccatatatcgcagcctggttgcagactaactacgggctaggtgcggtggggttatatctggcggcgatggctggcttgacgttaatcgccctgctgctgacccatgagacgcgacatcagtcgttgtaataagagtgaaaagcctgatgcgctacg

SEQ ID NO: 1541 - DNA, 3746 bp, Escherichia coli
  Strain O55:H7
  modified_base (1415)..(1415): a, c, g or t
  modified_base (3742)..(3745): a, c, g or t
aggcctgaatttccatacaatatattgaattcgcaaggatttgtaggccggataaggcgttcacgccgcatccggcatgaacaaagcacactttgccaacaatctaaatctgtttaattgccggatgtcagacatccggcaattatcttcacttcttcatctgcgacaaaatcgtccggcactgattagcctccccttcggaaggtgagatcagtgccagcaacgctgccgctggcgtaaccagcgttgccagtgccgcagcaacagcaccacgggcaatcaacggcccggctttcaccccagcctgaggatttttaaacgtcccacgcacatacagcggcgaacgcagtgtgataatccgaatacctttactctccggatcaatagtcaaatccagctgttccgaagcaaaacttgccgtgccggtaacgttaatcaacgcgttctcagtatcgaaagcaaaaatctgcgggcgtgccacgccgttggcaatattcagattcgccgccgcgcagttcacccgcacctcatcgtcaccaaatatcgcaccgacaatgtagttgccgacattcagcccaacaatctccatcaggttgcggctcaccagcccgtcattcatcaacagtttcaggttgccgttactgttgcctaaaagtgccgccaccgagttaccgctaccgcgcagttccgcgtcaccgttcatttcccccagcgtcttctgcatcagttccacatcgggcatcagttctttcagtttcagtcgacgagcctgaatatctgcccgcccctgcatcggctttttatcgccttccagatgaatattcgccgcaatgctgccacccgcaatgccaaatttcagcggttgcaggcgcaagtcagcatttttgaggatgatatgagtagaaagatcgctaatcggcaggctactgccatgctcaatgcgccgccctttgaagcgaacatcggcatccataacgtcccatttatcggtttcgaagcggtcataaggcagcactttgcccgcaggctgaacgcttttttcgcccttcttctgttcagaccgtttcgacttttctgcccctttcccggaatcaacgccaatcaacggtcccaggtccgccagccgcaattgccgcgactcgacatcaccttccagttttggtcgtggcttgccggtggtgtagaccagagaaccgtggatatcgctatcgccaattcgcccattaaagccgcgataatcaaagaccgacgatttttcagtgtcgattttcgctaccagccgaccatccgtttcaaacggcggggtatcgggcagcagaacgcccgtcagttcatagagatcacccagtgaatcgccagaaaatttaagccgtaaatcgacaccgcccatcttcattgggtcattcacgacgccntcaaaagcaacacgggtattacctgaacggaaatcagcctgtaccggaaacggcgtcccttcgccacgcagcgccagcataccgcctatttttcccgtacccgtgagcggttcaccgttataacgtccctgcgccttcaggccaaaaacgtaatcgcccaccttttctttatccgctttacctttcgatccagtaacttcgctgaacggcagcggcttgcctaagggatcaacaaaaatctccagatccgctttgcttactttgtcatcaatggcgatccgcccttgatcgaaaagaatattatccagccgaaacgaccatgccgacggctttgcattcgcgtctttgttatcatcgttggcgagattaaacgtccagttattgttcttttcagagaggcgaatcaggcgcgcgtcgggcttttcgagcttgatccacggcagccagaccgttttggtcagcagcgccagcggggccagcgttgcttctacgcgtggcaaatgcaccatcgtgacttcgggaatatccggtggattgccaagaatgatgtcttccgcgtgtacatggggccacggcacccagctgcgccagccagtttcttgcttttgccgctcccacaccacgcccagatcgccacggatagcgaacggacgattcaactccgcagagactttctggttgatggtcggtttgagtcgattccagtcaaaagttgcaatcaaaatgatcgccacgacaatcaacaacaagaaagcccctgaaatcgcagcggttattttgcctgccttgctcatcgttcgcttcctcatattcttcctgtgccagtcctaaagatagtccagccaggcggaaaatgaggcagcttatagcgccagaaccgccgtattcagcgtttctatcggtgccgggcgtgaaagaaaccagccttgtgcggcgaatgcgggcgagttctgtacatcacgccactcttccggcgtttctacgccctcgacaatcaccccgcgacaatagcgattcattagatgtaaaagctgagaaaagagtgtgcgtccttccggcgactgacgcagcatcacaaacagttctcgcgcgattttgatgtagtcataacgcacttcacttagtgcagagaaatttgccatcccggtaccaaaatcatccagccacagcgggccaaattcacacatcgaggcaaaggttgaatctttcggcagacggatatgctccaccagttcgaaacgcagccagggaagacgctcaatctggcgcaggatttttggttgctgacgcagggcgatgagcgtaggaccatcaatattgaccgatgccagcaggccgtgctctataaagaagtcggctttttgcgccagcaaatcaatctgctctttcacaacctccatccgatggctgacggtgatttcagtaaaatagcgatccggcggcaggcgttgcgaagggttcaagggatgcgtgaccgccgttaatagctccacggccattaaccgcccgcatgtttgatagatcggctgccaggtgtaagcacgctcacactgcaaccaaaaacgccgttcctgcaagctctcgatgcttgcttcagggttgcttattcgctggataacctgccttatcatcaaagatgtcctgtgtttaaaagtgatgcagcccagactcgacaaagattatcggcgcgcaagggcagaactttaccgcctggccggggtaaatttccccactccacaacggaatctttcaggaatacgttctggctcaaaaaaataatggaacactgttttaatatggttgaccagcaaaccaccacagcgcaaactaacgctaattttttacagatcaggttcacgactatgtccaaaaagattgccgtgattggcgaatgcatgattgagctttccgagaaaggcgcggacgttaagcgcggtttcggcggcgataccctgaacacttccgtctatatcgcccgtcaggtcgatcctgcggcattaaccgttcattacgtaacggcgctgggaacggacagttttagccagcagatgctggacgcctggcacggcgagaacgttgatacttccctgacccaacggatggaaaaccgtctgccgggcctttactacattgaaaccgacagcaccggcgaacgtacgttctactactggcgtaacgaagccgccgccaaattctggctggagagcgatcaatccgcggcgatttgcgaagagctggcgaatttcgattatctctacctgagcgggattagcctggcgatcttaagcccgaccagccgcgaaaagctgctttccctgctgcgcgannnnc

SEQ ID NO: 1542 - DNA, 12457 bp, Escherichia coli
  Strain O55:H7
  modified_base (127)..(127): a, c, g or t
  modified_base (177)..(177): a, c, g or t
  modified_base (3683)..(3683): a, c, g or t
  modified_base (3687)..(3687): a, c, g or t
  modified_base (5360)..(5360): a, c, g or t
  modified_base (8866)..(8866): a, c, g or t
  modified_base (9772)..(9775): a, c, g or t
  modified_base (9955)..(9955): a, c, g or t
  modified_base (10762)..(10762): a, c, g or t
  modified_base (12438)..(12438): a, c, g or t
  modified_base (12453)..(12456): a, c, g or t
ggcggaaaagtgattttcgacaataactatcgtccgcgcctgtgggccagcaaagaagagacacagcaggtgtaccaacaaatgctggaatgcacggatatcgccttcctgacgctggacgatgaanacgcgctgtggggtcaacagccggtggaagacgtcattgcgcgcacccanaacgcgggcgtgaaagaagtggtggtgaaacgcggggcggattcttgcctggtgtccattgctggcgaagggttagtggatgttccggcggtgaaactgccgaaagaaaaagtgatcgataccaccgcagctggcgactctttcagtgccggttatctggcggtacgtttgacgggcggcagtgcggaaaacgcagcgaaacgcgggcacctgaccgcaagtaccgttattcagtatcgcggcgcgattatcccgcgtgaggcgatgccagcgtaaacgcagcatatgcaaaaggctggataaagagttacccctctatccagctcatccataaatacctgatggttgtgctaactcatcaccatcaggcattactgtgcaggtggaatatccgtcacttcaggatgtacgtcatccgtggcgacagaggtggtcgcagcggcggtagatggggccatgatttgatcccaggccgcctgcaacgctttcatgttaaattccggctcgcctttcggctgcagcagtattaacgccatatcattcgacaactgctgacgcagatcctgatttaacatctccacagtcaggctgttaaggaaatcctgccgcagtttctgatactgctccggcgcgatatcgacgacctgattttgcaacgaacgcatccgctggcccatcagaatatcggtatcagcccgtgcataggcggcaaacagtttctgcagctccagtttcttttgcgccactaacgcattgaactcttcttccggcagacctttatcgcgaaccttcgccagttcacgcgccaccagattaaggttgctgttcagcttgtcgtttggtgattcgatgttgatggcacactgcgcacgcagatacagcacacggcagtcaaatccaagaccgatgtctttgctgttactggcgcttaacgcttgctgaacatgccagaacagcgcctcacgggccaggtccgcacgccagtagcgcagcagtgcggctgattcacgaatcggctgccacggcgtatcccacatgatagataaccggtcctgacgcaccgcgtcagtcataatactcaccgcttccgcacgcagcggagaaagcgtcggcaccggagccggtgtttcacgtttgcctttcagttcgccaaacgttttgttgatttggtcgacgaccgagcgcgcatccacgtttcccaccaccagcagcgtcattgcatccggggtgtaccatttctgatagaaatctttaattttttccgcttcaacgggttgtttcagcggatcggcaggatcgtgacctaacaaggttgaccctttcagacgatagcgccaccagccctctttagtatcggcaggccaggttgccaccatgtcctgactttgcagcgcgtggttgatggtttctggcgtgatagtcagtttgccagtggcatttgccagataagagagcgcctctttcagcaaatcgttacggttattgggcaaactcagattaaacagcgtggtgtcataagagacaattaccggcggcatcgggcgtttagggtcgatcccctgctgccacaatgaacgcgcctgtgctgcgtcaaggccaccgctttgcgttagcgcaatacgagggatggcgtgactgtaaccgctctgttgtgtactttcggcgagcgaaccggtattaaccagcaggcgaatttcaacacgatcgctgggacgctggggggtggtcagcacttgccactgtaaaccgttggaaagcgtcccctgttgccatgctggatcaggctggagcgcatctgcctgcacatagccagcagtggccatcatcagcaaaccgcccgctaaaagtcgaatttttgtgccctgcatgtgaacccctgatcaactatcctggtaataaaaaaactgcccgttgtcggtcagtctaaatgacgttaaaaacacttcgtgttagaccgcaagaacatgaaaatgtcacggaagaagtgaaataaacctgaactcacccaggtggtaagttcaggcacaggggtcaattatgcgcaaacacccgcactcggggaagggagtgcgggcataagtgatgagattaagaggataattcgtgcgttttgccatccggcgcacgattattcagcacatcgtccagttttttgtggtccagttctttcacccacttagcaacgacaatggtcgctacgccgttaccgaccaggttagtcagcgcacgagcttctgacataaagcggtcgataccgaggatcagcgccagacccgctaccggcaaatggcccaccgcagagagcgtcgccgccagcacgataaagccactacccgttacccctgccgcccctttagaagaaagcagcaacacgattaacagcgtgatttggtggacgatatccatctgactgttagtggcctgggcgataaacaccgccgccattgtcaggtatatcgatgtgccatcaaggttaaacgagtagcctgtcgggatgaccagccccaccaccgatttacggcagccgagtttctccatcttgtcgagcatacgcggcagcgccgactcggaagatgaagtccccagtacaatcagcagttcttcacggatgtagcggataaatttgaagatactgaaaccagtcgctttagcgattgaacccaataccagcaccacaaacaggatacaggtaatgtagaaacagataatcagctgccccagttgcaccagtgtgccgacgccgtatttaccgatggtaaacgccattgccccgaacgcaccaataggtgccagacgcatgatcatattgatgatgccgaagatgacctgcgagaaactttcgatgacgttaaaaatcagttggcctttgctgcccagacggtggagcgcaaaaccaaacagtacggcaaacagcagcacctgcagaatgttaccgctggcaaatgcgccaatgacgctcgccgggatgacatccataatgaaggcgacaatgccctggtctttcgcctgatcggcgtaaaccgctaccgctttcgcatcaagcgttgccggatcgacgttcattccggcaccaggctgcacgacgttaacgatgataagaccaataatcagcgcgatggtactgacaatttcaaagtaaagcagtgcgactgcgccggtacgaccgaccgccttcatgctttccatgcccgcaatgcccgttacgacggtacaaaagatgacaggagcgatgatcatcttaatgagcttaacgaagccgtcgccaagcggtttcatttgctcgcctatttcaggatagaaatggccaaggagaataccaatggctatcgctgtcaggacctgaaagtaaaggcttttaaacagagaggttttcatagggtgtcctttagtaaaaccacaggtcttgtaaggttatggggtacctgcggccttaaaataacacccagacaacatcacagaaatgtacctggatcataattgaaacaaaaaggttaaaaagtttgagntggntcgcacaaaccagcactttttaaagttttgtaatcagtttggggtagctacttttcttccaggtaactctcttcgaagatttcaatagggagtggacgagcaaaaaggaagccctgggcaataccaacgcccgcttttgccagccagtcgcgttgtgcttcagtctccacgccttcggcaatcatttgtaagttcaggctctgcgccagcatgataattgcagcaatcatgctgctatcttccggcaagccttcaacaaacattttgtcgattttcagaacgtcgattggcaacgatttcatatgctgcagctgacgcagccctgcgtagcccatgccgaaatcatccagcgccacccgaactccggcattacgcagcggacggaggattgccaccgcagcatgagggtcgtcaatacgtcggctttctgtcacttccagaatcagtgttcccggctgaatgcgatagcgggttaacagttccagcatatccgccaccatattcgggtgcatcagttgcagcgcagagaggtttaccgacaagggcagcataatgccgcgctcttgccaggctgcaagcaatcgacaggactcttccagcacccagtgaccgacggtaaccatcagcccacagcactcaatgcgatcgattaagccatccggcaggtcccaactgccatccggttgctggatacgcagtaacacttccgcactgaccagtttaccgctggtcatctcgacctgtggctgtaaccaaatagcaaactgatgattttccagtgcattaaggatatcgctctcttccgtcaaccgcttctgggcggcttccatctgctgcggatcaaagaactgaatctgattcttgcctttatggcgagcggtaaatgccgcagaaatagcgcgactgtaaagctgttcggcggtgagatcgccgtagaacatcgccacgccaatgctacagtgcggacggagttgaatacgttcaatcggcaggcgctcgctcatgatagtgagcacttgctgacccaaagtgattgcgtgccacggttcatgtacaccgttggcaatgacagcaaagtcataaccgctaatctgcgcgaggatcatacgtggcgacagtaccgatttgagtttttccaccagcgtcagcagcagaatttctcgttgcgcctctttcagcacgcccgcagtatcacgcagagtttcacaggtgatgatcatcagcgcggtggtttgtttacgcgcgacaacctgctccagcatctccatcagcaaggctttgttcggcaaatccgacaccgggaagcgcatcgcattttcgttctgttcttcataatggcgctgcagcaattgctggttgaggttgtaactgcgcaccaacataccgatttcatcgtcctgatgcagacgcggtaatgccagttggtgaccaacaagctcctgggctgggatggcgttaagttcgcgagcaatattgcgtaacggatgcaaaatcaggcggttaatgcaccagctaatcgccaccgtcaatattaacgacaaaagtaagtaaatggtcactaacgttgagagggtgctcatcacgaacttatacatacggaaggaatccgcctgtagcaccagataggcaattggctgcggatttgccggacgttcgagcgagtagacgcccancgagatttgaaccggtagctcaaacaggcgagtaaccattaccggcaccggacgctctggaataaaacttttacgcagcgcctggaactggttaggcagcactacatcggcacggctgaccacgcctgccggtttaatgctggcaagaatagcttccgcttcgggaatatcacctttcaaaatggctgaagataaaggttcgcggacagagcgagcaatgctttccagttgcgtagccgtgttatagcgattctgctggaccagatggaacagcaaaacggtgcaaaaaataaaaacgaacaccaggacaacggctgccaccattgccatctgcttgattgttaacgagcgacttacgcgcaaattgtctccccccggaaatcccagattgccgcccgagtatacccgatcgcagcggcattaagagaggcgctatctgaaaacttaccagtcggcgtaaggtatcagcggctgcggcggtaaatccatgtcaccctgccatccggcggcggaataacgtacgtagagcaggaaatggctgggggcgtaatctttcgcctgctggatatcaattgccgtgccgacaaaccagttggaagtaacacgtcgttcaagtaatgcccgcgccgtatagccgaagccctgactgctgccgccatcgttggattgccgcgcagcttcttcctgccagtcggtcgggatcagattcatcagcggataacgcggcatggttttggtgcgtgaatgcgaccacgagccagacgcccccagctcccacgaccagttttccgtgcgctcccgccacatcaccggtatggcaaacgacaggtattcctgcgggctgtagtaaccgccctgaccgagtgagtagccactcaggtctttgtcgtaatgccagatcatgttgttcaggccgattgtgacgcggcgattgttctggttgatgaccttatagtaatagcccgtcatccagcgcacacgccagttatcttcgacatttttaccggttaactggtcgccactaagcgatgcccagacgccgtttgcttcacctttatcgtagctcaggcttagccccacgccgtcggcacgcacgccgccccattttttcccggtattgctcggggagtctttttgcccaccaaaggccagcaaagaactggagatgggacgacggtgggcgttaacggtgtaacccagcggcccgatatcatcgctgtaactgatgccgccgaccacatccaccacgttgaagcccatcggcgtggtgccgatatcccagctccagacgtcatttcgccagccgaccgccacgctggcaccggaatccgactggctgcggttgccgctacagtcctgtaatgtacaggtgccccagttgtcatcccatttgccatcggcattagtggagaaactgccgacgttcatattgacgaaatcactgcgaaagaacatccgcccgtcagaatacggcgcatccacctgcaacatggtagtgtgcgctttcagatcggagtaaccaccggtgccgctcgaaccccaataatcatgctcgagggtgacgttaagatcctgctggcgatagaggtccgccgcatcgctgcgcacgccgcgtttcagccagtcatctttctcgtcgttacgggtcagtcgggtaaaggtgtcgttatcctgcggacgcgtcgtagtcacaccggatgcgaccatggcgtctttgtaggtttccagcgcctgctttggatcgcccgcctgcgcttcaaacttcgcaccgtcgcgcagcaccatcgcgctttccatcgacggtggctgagattttgcctgcgggatcaacttattaaacgtctgctgcgccgctgcggtatctccaagctgcgcctgcgccagcgccacgcgccgctgtgtgttcagcgaggcgttatcagtagcgggcagtttcgccagctggctacgtgccgccgctgtgtcaccggcagcaatatccacttccgtcagaccaagaatggcatcggcgttagttggctcccgcgtcaggacattctgatatgcagcgcgggcggcggtgtaatcacgtcgctgcagcgcccagtcagccagcgtgaggtcaatacgcgtggaaggtggttgctgacgcagcatcgcttccgcttcagcttctttgccgctttctcgcaggcgattagcggtttccagcacctgatcgctttgcagtcgattaaccagctcctgaatattgctgctccactgcgcacgcggcaggctgttgatatgcgccagcgccgctctgtcctggtcatgaccagagaggtacagcccgtaagcgtaaacctgctccgggtcgttcggcttctgctgcgccagattgcgcattaacgtatcggcctggctgcgttgtccggcctgccagagatcctgcgaaagtcggtaagtaatccatacgctgccggggtccagcgccagtcgttgccgctgaagtgctgccgcctgcgcccatttgccctggttttccagtgcctctgcctgctgtgccagacggtcgttttgcaggctgcgttcgatatcatcaatgctacgccgctgactggcagagagtgaggcgataaacgcttcagctttttctggcgattgctggcggtaaatatttgccagcccgcgcacggcgttagtgttgccgctgtccatacgcaaggtctgctgataataacgttcggcggcgggataatcttttcgcgccatcgccacatcgcccagccccagcactgcataactgtcggtgttatcgacattacgcgcctgctggaacaggcgttctgcccggtcaggattattggctttcagcgcagcatcgccctgctggatcgccagccagtagcggtttactttcagcagactgttccatttgtcgttgttgctgctgtgcggatccagtgcgagggcttcttccagattcgccactgcattggcgcgatcgcctttctgtgaatatgcctggcccagcgcccccagagcttcactgtctttcgggtttgcccgcactgcctgttgtagttcgggaatggctttacccgccataccagagtccaccgccgctaaaccttgcgcacgagcgcggaaagcaggatcggccagctgtttttgctgttctgccagttgcgattgcgcagccgccacgctatcgccatcactaaagatagaaagatattttttcagcgccgacacactggcatcactgacgggcatgtctttaatctgcccgtaccagattttagaggccccttcgcgcccggcgttcgatttcgccatctgttccaggacggcaaaaccttcgtcacggcgatcgctactaaacagcaatagcgccagattgttttgcaggcccgtattgcccggtgcatccgcattgatgcgttttaactgattaatcgcttcgccacggcgagccggaattttcgccaccgtactccagtactcgacagcaatgtcaccttccggcggcgcaccgttgaacngttcgccacagcttcttccgcatgaccggtagtcgcctgcaatcttgcctgttgcagtgcctgacgaccatccggcgtggaaagtagcatcgtagtccgcgacgatttatacgcatttgaactcggcgctaactgcgacagccgatcgagctgtttttgcgcgccatcaatatcgccctgacgtaacaaagaacggaaacgggcggcaacgacgtccgggttattcggatcaataagttccagccgatacaacgactgctgcaccaggtcttcacgatgggtcgcttcgcctaaccgaacttgctccagcaactgttgctgagcggttggtgctgcctcgaccatcggcatgacggccagaccgagggaaagcgtgaatatgtttagtgtgaatttgcgcattcctggccccagtcaggtaataactcaccttttgtcgagaagcggaaacggtgttgatcccagccttgtccaaacagggtcagcacatagttgtaataggcatcgctgccgggaaagttatcggccacgcgctggcgctgaacggcctgcgcatcacggttttgtaaaaagggcagcatggcggcagaaaaaccgaccggtcctttaccctgcgctttccccgtagccacatccactttttccggcggataaccgtttttctcagtgaatgtcgccatcggtttaaaccggttgagcatccgcgctttctgcggatcgctgtcaggcatcatgcctacccacatgtaaacgcggatagcgtcgtagctgctgatcaatgttttttcggcttttagctgccagcctttgtctttctcatagcgcacccagtctggcgaaaagcctttcggggcggtttccagcaataaacgttgattggtttcgcgcagcgtagtccacggcgcnnnnaagcgggtgaaatactgcgccagcgtcggcggcaggtagctggggttaaaacgccagctgttatcctcagcaaaacccactttgcccggtaacaacatggaacccagcccaggcaccgtcaccacttcctcccgcgcaatacgttttagcaacgcgctgccgatgtcggtataacgctgntctttccacaaacgccccgcctccagcaacgaccaggccatccagacatcaccatcggaggccgaattgctgtccagcacttcccacttactgttctctttcttgccccacagccaggcgggcaaacgttcttttaaagaaccctgagcgagattgttctgcgtccagtcgagaatattatcgaaagctgcacggtcgttagccgccagggcaaagaacatgccgtaactttgcccttcagaggtggtgattttgcgcgcgtcgctggggtcgatgacgcgcccttcctgactgatgtaatcctttttaaactgctcccaggcaggccaggtacaggctgcctgaacactaaaggcagccaacagcagcatcgtcacgagtccactacgcaacacattcatcttcaattactcgttatccgggttaagacgacgacggctgataatacgcagcaaacgccacagtacccatgccagcaatatcacactgatagccgccagcaccgccagcagaatcggatggtttgccagcgcataccacaagcgctcgaaccacggcagatgacctacgtaataaacgtcgccaacacgtaggctgttgataccggactcgcggatcaccgcgaccgaaccgaacatggtggcgcgtttgccgctatcgttcaccgcatcgttaagcatttcataaccgcgtgggctatctgccagcagcgcaatcacgctgcgctggtcgttatacggcgactggaagccaatcaccgccgccatcgcaccggaagaggtcagcgttgactgggtttctgccgcncgatcgctctcgtccggcacaatgccggggaacggggtctggcgcatcggtgttttcacccagctttcggtcgcctgcaccaataggtcgatctgcttatcgtctttcagtttgtccgggataccaccgatgatcatgatgtcggcatctttgccctgaatggtgctgccatcatcggtcaccgtcagattaatcgccgggaagcccgtctgtgcgccgataaaaccaacagtattcagcaacgtttccatctgtgcttcgttaggcgttttcggcatcacggtgatggtttgcgacagatccgccatccggctgaacgggaagcccgcgttagcaaaggcgcgtagatccggcatcgggatgaagtggtaatacttcgagaagtcgatggtggagtcgtcaccaatcaccacatgattctgcaccggctggaaggtaatacagttatccaccgaaccgccaggcatcgggttcatatactcaaagtcgaagcgcagctggttggtcgcgcccagtttcagcgccggaatagagacatccgttttgccatccagcaaaccttgtaataccggaatccgcagcagcaggcggttcgcctcctgtttgctgctcaggttgaaggattgcaggaactggttattcaggctgatatccatccgcgaactgtctttcaccggcggcatggtgtagcggtaattaatatccatatcaatgccggtactgcgcatcaggtagagatctggcggcaggtttagcgaaacattaatcgctgctggctcaagaccgctggattgtaactgttcttcataggttttcagttcaccaaaggtgaccggacgatcggtacgcacccagttcggcgcatcgtacggcttacgcggtagcagcggtttcacttcattcactaccacgctttcaccacggaacagaatgttaccctgagcgatacctttcgctgcctgcaacaggtctttgtcgtcacgaccaaacaccaccagcagtttgacgtaaggattctgcggatggttaatcatctcaatcaccggggcttttaccgccggatgatcgcgcaggaagtccggccgtttgtcgttggttgcaaagacaatggcattacgatccggcagttggttatagagcaccgggaagttctgcccacgccagccagaacgcgaaccaaaccacgaggcgacaatggcagatgcttgttgcagcccaacatccggcgcacccgcaaagaccatcggcaaggtgttggtgcggttatcacgcgggtcaaagaatggcaccgggaagtgtgacaggtcattcttcacattcagggtctgataggtcagatccagtccactgctccgcccaacatccagccaaagcgtggtgctggccgggttttcgcacacgtcctgataatggccgacaaactccagccgcacacggttgaagtcggtaataaacagtggattaatgggcatttgcgccagcgtttttttacccaactgttctttggtcactggcagcacgcccatcagctcatcattgagataaacctttaactgcgactggacaggcagtaacgatggcgatggcgtgtattcgaggttgagcatcgccttcgtcaccacttcatcgctgcgcataccaaactcaatgctgccgttcgggttaatgccacgtancaccatgctgcccgnnnnc

SEQ ID NO: 1543 - DNA, 12686 bp, Escherichia coli
  Strain O55:H7
  modified_base (2)..(2): a, c, g or t
  modified_base (180)..(180): a, c, g or t
  modified_base (1171)..(1171): a, c, g or t
  modified_base (1371)..(1371): a, c, g or t
  modified_base (1681)..(1681): a, c, g or t
  modified_base (2310)..(2310): a, c, g or t
  modified_base (3675)..(3675): a, c, g or t
  modified_base (4323)..(4325): a, c, g or t
  modified_base (6029)..(6029): a, c, g or t
  modified_base (7083)..(7083): a, c, g or t
  modified_base (7172)..(7172): a, c, g or t
  modified_base (8474)..(8474): a, c, g or t
  modified_base (9751)..(9751): a, c, g or t
  modified_base (12682)..(12683): a, c, g or t
tncgcaaaggtcagcttcacatcacgcgaaggaccgttctgcgccacgactggcgcatcagcgccctgcacgcccggcatcacttgccccacctgcggattttgttccgtctgggcggctacagctggctcagcattgatcagtggttgcgttgctggcgtcgcctgcgtcatgaaagangggaacgcactcatccccatagccactgcacaaatccagaatagttttcttttcatcgcgttatcatcattgttgagccaaagcctgatccgatggttgtgccgtttcgctccgctccgggcggcgcggaataaacgatacaacccaggaaaccagagaagtcagcacacggaatatgcccttcaccgaagaaggcgcaaactccgccagatggcggtagccacggaagccgagcttcagaatatccagcagactttccagcggcttatcttccgggtagctgtcctgccagagcgcccatgtatccgcacgggcaaacgtacactgcacaaaatcgatatgttgctgggtggtgagcggcattaatttcagcccaacttcattacccatcacgcgcgccacctgggtcgggaagacgtattcctgctgaccgcgtttaagcaacagattcactttctgcccttccagaatctgcgcctgaccgttgatcttgatccccaaaccaccgtcggagaaatcctgaacggtacacgagaagaggtgaccatcttcgcgggcaattgccgcgggcatcgtcatctccacgcggtgcgatcggcgtacctgtttgctttctaccgataccgcaactgcgccgccaagaacaatcaggttgtagaatacccacaccatactgacgaccacggtgagcatctcggttggcgggccatagaagtagcgccagatgcctaccgcaacgcccaccaggttgagcagaacaaggaagatgtagggccgcgagatcacccagtcgacgtactcttcttccaccagtccacctttggcggtgacgttaaatttgcctttgtgcgggttaatcagcgccaccagcgtcggtggtgcgatataccacgccagcaccgtttcgtagatttcactccagaaagagtggcgatatttgccctggatcttggagttggtcaggctggcatggatcatatgcggcagcacnaacagggcgatcatcaacgctggcgcatagatgatgtaggcatgaagcagcaggaacgccagcggcgcagtcaggaagatcagccgtggaatgcccgacaagaagtggaacatggcgttgacgtagcacagccgctgagcaaacttcagccctttaccggtgagcgggttatcgagacggaagatttgcaccatcccgcncgcccagcgaatacgctgaccgatatgcgccgacagactttcggtcgccagccccgccgcctgcggaatacgcatatacgcggaggtatagccacgacggtgcaaacgcagagaagtatgcgcatcttcagtcacagtttcgacagcaatgccgccaatttcatccagcggcttacggcgaatcaccgcacaggaaccgcagaagaaagtggcgtcccacatatcgttgccatcctgcaccagaccatagaacagcgtgccttcgttcggtgttttacgaaaacgccccaggttgcgttcaaacgggtcnggcgagaagaaatggtgtggggtctgcatcatcgccagctgtttctctttcaggaaccagcccacggtcatttgcaggaacgatcgcgttggtacgtggtcgcagtcgaaaatcgacacgaactcgcctttggcatatttcagcgcattgttgatgttgcccgctttcgcatgttcatgagtggtacgggcgatatacttcacccccacgttttgcgcaaactggcgaaactcttccctgccgccatcatcgaggatccagatgttcagcttgtctttcggccagtcgatacccagcgaggcgtaaatggtatttttcaccacgttgagatcttcgttgtaagtcgggacaaagatatccaccgacggccacagcgacatatctttcggcaatggcaccggctgacgattcagcggccatactacctggaagtagccgagcaccagcacaatccacgcgtacgtttcagcgaagagcagaataagcccgcacaccaggctgaccggatcgtcccagttcagcgtagaggtatatcgccaccagatataacggcaagaaacagtcagcgacagcacaatcaacattagcgctgagaagcgccccggcatccgccgtacgatcagcgctancccccacagcagcatcaggaagataaactgcgccagcgggttaaacggctgagtaacgcagattaacgccagaatcagcgagaaggtgacgatgataccgaggatcaaccgccgcgccccggcactcaaatgaccgagctcttttttctcatcaagatgctgtgttttatggctaacgcgctcaggcagctcgttcatccattgatggtaacgtccacgaatattctgcagacctgaaaatgcccgcctgcgcggtttcggcgtttctttgcgcgatgcaccgatcagtaaccagcatgtttgaatgagataacggaccgggtccagcggacgcggacgcgaggcgttgatatgcggatacaggtttttatgttctgcgcgaatacgctgccagcgcgggtgctccagtggaataaaaatccaggccaggatcatccagaaacagccgagcgtcgcgctgaaagccgacgcaccgtgacgacgataatcgcgataacgcccgataagccgcgcgttgaccggcgggataagcaaccaccgggtcaggatactcatgatgcactcccgactggcgttttcagcccggaatagttcaacaggcaccagttcgccagcgtcaatatctcttcagccgccagcgcatcactgcgatattcacctactggttgcttagccgccaggcattcagccatcgcttcatcacgatgaatgagcatcggcagtaatcggcgctggctttgcaaccaaagctggtaaatatcgtcctgaacctgactgccaatacggaagttattaatcaaaatatgtgcgccatccggcagcgcttgctgatgcagtcggatatggcagttggcatccacattgacgattgccagcgagtgatcgcacaaactcagcagctggtgggttatctgcgaggcatcacgcggtaagtcgattaaaatccactggtaacgcccgctggcttttagttgctgtaagccggagcaaatatcgctcagccgggtttgccagtgctgtggattttcttgttcttcaatggataactgaccaaaaggcagcaaatcgagctgcgaggtgtagcgcaacccagcgtcgcgccagtcctggccatccagcatagctctggcccagccctgacggtgggtaaaatcaacattaaatgacaggcgcaacaagttgtccgggcaggcatcgaccaccaggacattttctcccaacatttgtaatgaccaggctaatgcggcggtgatggttgttgtccccacgcctccccgcaccccctgcaatcccagtacggccattcaccaatcccctacttttgttgcgcaaactctgccagcaacggccagcgttttaatgccncggccaactgttcgcgttgggaaatatcggcataatcaatatcaggcagtgaaaatgcctgctttaacgccaaaatatcattctggaagatatagcctatcgcgggatcaggcagagtatctggttcattgttattcattttgcttgatccctatgaaataaccgtaccgttcatgagacaattctaaccgtgagcatttcgccggtttattgtttacggcgagacgggaatttgctcactttttgactttccgttacgcaacagaaaaagttaaaaacgaaaagactaaaatcacacgtcttgtgacctgctaaattgattcacatgctaaatctgataagttttaatttcaatggtaggtttatttcttagctttcgctagtaaactgataatcagacaaaatggtgacatgagggacattgtggaccctgtattctctatcggtatctcatcattatgggatgagctgcgacatatgccagcaggcggcgtctggtggtttaacgtcgatcgccatgaagatgctatcagtctggcgaatcaaacaattgcatcccaggctgaaaccgcacacgtcgcggtcattagcatggacagcgatccggcgaaaatctttcaattagatgattctcaagggccggaaaannnaaaattattttcaatgctaaatcatgaaaaaggtctatactatttggcccgtgatttgcagtgttctattgatccccataattacctttttattcttgtttgcgcaaataacgcatggcaaaacattcctgccgagcggctgcgctcatggttggataaaatgaataaatggagcaggttaaaccattgttcgcttttggtaattaatcccggaaataataacgataaacaattttcattgttgcttgaggaataccgttcactttttggtcttgccagtttgcgttttcagggcgaccaacatttgctggatattgccttctggtgcaacgaaaaaggggtcagcgcccgtcagcagcttagcgttcagcaacaaaatggtatctggacattagttcaaagcgaagaggcggagatccaaccacgcagcgacgaaaaacgcattctgagtaatgttgctgtactggaaggtgcgccgccgctatcggaacactggcaactgttcaacaataacgaagtcctgttcaatgaagcccgtaccgctcaggcggcgacggtggtcttttctttacagcaaaatgcgcaaatcgagccactggcccgcagcattcataccctgcgtcgccagcgcggtagtgcgatgaaaatcctcgtgcgggaaaataccgctagcctgcgcgccaccgatgaacgtttgttattggcctgcggtgcaaatatggttattccgtggaatgcgccactctcccgttgtctgacgatgatcgaaagcgtgcaagggcagaagtttagtcgctatgtgccggaagatatcactaccttgctgtcaatgacccagccgctcaaactgcgtggtttccagaagtgggatgtgttctgtaatgccgtcaacaacatgatgaataaccctctattacctgcccacggtaaaggcgttctggttgccctacgtccggtaccgggtatccgcgttgaacaagccctgacgctgtgtcgccctaaccgtaccggcgatatcatgaccattggcggtaatcggctggtgctgtttctctcattctgtcggattaacgatctggataccgcgttgaatcatattttcccattgcctactggcgacattttctcaaaccatatggtctggtttgaagatgatcaaatcagtgccgagctggtgcagatgcgcctgcttgccccagaacaatggggcatgccgctgcctttaacgcaaagttctaaaccggtcatcaatgccgagcacgatggtcgccactggcgacgaataccagaacccatgcgactgttagatgatgctgtggagcgctcatcatgatgaccatcagcgatatcattgaaattattgtcgtttgcgcactgatatttttcccgctgggctatctggcgcggcactctttgcgacgcattcgcgacaccttacgtttgttctttgctaaacctcgttatgttaaaccggctgggacgttacgccgcacggaaaaagccagggcaaccaaaaaatgactcaatttacgcaaaataccgccatgccttcttccctctggcaatactggcgcggcctttccggctggaacttctattttctggttaagttcggcctgttgtgggcgggatatcttaacttccatccgctcctcaatttggtgtttgccgcgtttctgctgatgcccattccgcgctacagcntgcatcgcttgcgccactggattgccctgccgatcggctttgctttgttctggcatgacacctggttgcctggcccggaaagcataatgagccagggttcgcaggtggcggggttcagtaccgattatttaatcgaccttgtcacacgctttattaactggcagatgattggggccatttttgttttattagtggcctggttattcctgtcacaatggattcgcattaccgtttttgtggttgccatactgctatggctgaacgtacttaccctggcgggaccaagtttctccttgtggccagccggacaaccgacgaccactgtaacaacgacgggtggtaacgcagcggcaaccgttgcggcgacgggtggcgcaccggtagtgggtgatatgcccgcacaaactgcaccgccaacaacggcgaaccttaacgcctggctgaataatttctataacgcggaggcgaaacgtaaatcgaccttcccgtcttcgctgcccgctgatgctcagccatttgaactactggtgattaacatctgttcgctttcctggtcggatatagaagccgctgggttgatgtcgcatccactgtggtcgcatttcgatattgagttcaagaactttaactccgccacctcctacagtggcccggcggcgatccgtttactgcgcgccagctgcgggcagacttcgcacactaatctgtatcaaccggcaaataacgactgctatctgtttgataacctgtcgaaactgggctttacccagcacctgatgatgggacataacggccagttcggcggttttttgaaagaagttcgcgaaaatggcggcatgcagactgaattgatggatcaaacaaatctgccggttattttgctgggctttgatggttcgccggtttatgacgataccgccgtgcttaaccgctggctggacgttaccgaaaaagataaaaacagccgtagtgccacgttctacaacacgcttccactgcatgacggcaaccattatccgggcgtcagcaaaacagcggattacaaagcgcgggngcagaaattctttgatgaactggacgccttctttactgaactggagaaatcgggtcgtaaagtgatggtggtcgtggtgccggaacacngcggcgcgctgaagggcgacagaatgcaggtatctggcctacgtgatatccctagcccgtctatcaccgacgtccccgttggggtgaaattcttcggcatgaaggcaccacatcagggggcaccgattgtcatcgaccaaccgagcagcttcctggctatctccgatctggtggttcgcgttcttgatggcaagattttcaccgaagacaatgttgactggaaaaaactcaccagtgggttgccacaaacagcaccggtctcagagaactcaaatgcagtagttattcaataccaggataaaccgtacgttcgcctgaacggcggcgactgggtgccttacccgcagtaagcacgaaaaaggccgcagagtttcccccctgcggcctggtccgggcgcaaattgccattacggcagcctgacgcccgcatgacacgttacttccgcttgttcagccagttcacgatcatactggcaagaatgccagcaatgaccggagccgctaaatcatgccagaaggccatgcccagctctgcgagcgtcatatagccgcctgtgttgtaatgacaacgtttcgcggctattcttgagtggtctaggttcaagattagcccccgtggtgttgtcaggtgcatacctgcaacgtgcgggggttttctctctccagcaaccaatgccaccagggattaagcccccgcaacattgcgcctcaccggaacccttccggcttgccgctaattttacgattgctttttactgtcagcactcggcaatcttcctcattgcgtgatgccttccagcttaatttcttaatttgcaatagttgcagttcatatccgggctgactccagactggtagtgaaatgcgcaattttgtagaattgcgcctcctcgcgacctccccagtgaatctgttgcctcattttttacatactgcgtattcgacttctccacctgttgcgcaagagaaactgggtttattcatttttgcgaggccgacttctttctggacaggactttatgcagcacaacacactaccgaaacacgatcagaaattgccgtttacacgctacgacttcggctgggttttattatgcataggcatggcgattggtgccggaaccgtgctgatgccagtacaaattggcttgaagggcatttgggtatttattaccgcagcgatcattgcttatcctgccacctgggtagtgcaggacatttatttaaaaaccctttctgaaagcgattcctgtaatgactacaccgatattatcagtcattacctggggaagaactgggganttttcctcggggttatctactttttgatgattatccacgggatttttatctactctctctccgtggttttcgacagcgcctcgtacctgaaaaccttcggtttaaccgatgccgatctttcacaatctctactttataaagtcgctattttcgccgtactggtagcgattgcgtctggtggtgaacgattactgtttaagatttctgggccaatggtggtggtcaaagtagggattattgtcgtgttcggttttgcgatgatcccgcactggaatttcgccaatataaccgccttcccgcaagcctccgtcttttttcgcgatgtcctgcttaccattccattttgcttcttttctgcagtatttattcaggtacttaacccaatgaatattgcctatcgtaaacgggaagcggataaagtactggcaacccggctcgcgctgcgtacccaccgaattagttatatcacgctcatcgcggtgatactgttttttgccttttcgtttaccttctcaattagccacgaagaagccgtttctgcctttgaacaaaatatctcggcactggcactggccgcgcaggtgatccctgggcatatcattcatatcacctctacggtgctgaatatctttgccgtactgaccgcattctttggcatttatctcggtttccacgaggccattaaaggcattattctcaatctgttaagccgaattattgataccaagaaaattaactcacgcgtgctgactctggcgatctgcgcttttatcgtcattacgttgacgatttgggtttcgtttcgtgtatcggtgctggtgttctttcagttgggaagcccgttatatggcattgtgtcgtgcctcattccgtttttcctgatctataaagtcgcacaactggaaaaacttcgcggatttaaaacctggctgattctgctttacggcattttgctatgcttgtcgccactgttgaagctgattgagtaaaccggagcgcatggccccggttttgtgagttaacgctgcggattttcatcctgatcaacagcaaaacaagctaccagttgaccgccgtagtcttttagctgcggctgcaactgggtgcaggggccgaagcgccgacgacagcgggcgttaaacgcgcagcccggcggtggattcagcgggcttggcagttcaccggtgagtttgatgcgctcgcggcgatcgtccggattcaggcgcggcgtcgcggaaagtagcgcctgagtgtacggatggcgcgggttattgaanatttggtctttcgttcccttctccacgcagcggcccaggtacatcaccatcacttcatcagcaatgtgctccaccaccgacaggtcgtgggagatgaagacataagaaagccccagttcctgctgcaaatccatcatcaggttgagcacctgtgcacgcaccgagacgtccagcgcggagaccggttcatcggcaatcaccacgtccgggtcgagcatcagacctcgggcaatggcgatacgctgacgctgaccgccggagaacatatgcggatagcggtcatagtgctcggttttcaggccgactttcgccatcatcgacagggctttttcccgacgctgttctttgcttaagctggtgttgatcagcagcggctcttcaagaatttgcccgacttttttacgcggattcagcgaaccgtaagggttctggaagacaatctggattttctgccgacgcagcttctgcgcctgcggatcgtgcttaagcagatcctgcccctggtaatacagctcgccgccggtgggcgtttcaatcatcgtcagcaaccgaccgagggtcgatttaccgcagccagattcacctactaccgccagcgttttgccacgttcaaggttaaacgaaacgccgtccagcgccttcaccagacgttccggagcgaacatacctttcttcaccggataatgttttttcaggtcgatagcctgcaacagcggttgttgcgaggtggcctcttgcgtactcatagtgtcggcctcccggcatcatcaagtgggtaatggcatttggactgacgcccgtcagcgagcatattcagcgccggttcttcagcgcgacatctgtcagtggcataggggcagcgcgggttaagcaagcagccgttcgggcggtcgtacttgccgggaacaacgccaggcaacgatgccagacgttctttgtcctgagcaaattccggcagcgcacgcagcaatgcctgagtatacgggtgacgcggcgcatggaagatggcgtgcgcatcgcccgtttccaccacctgaccggcatacatcacgatgattttatgtgccgcttccgccaccagcgccaggtcatgggtaattaacaccagcgccatgttctctttctgctgtagctccagcagtagttcaatgatttgcgcctgaatggtcacgtccagcgcagtggttggttcatcggcaatcagcagttttggccgacaggcaatggccatcgcaatcatcacgcgctggctcatgccgccggaaagctgatgcgggtaaacatccagacgcgaagccggatcgggaataccgacctgattcaacaagtcaatcgcccgctgacgacgagtgctcttattaccgccctgatgcaccttaatcgcttccataatctggaaacccacggtgtagcacgggttaaggctggtcatcgggtcctggaagatcatcgccacttcggcacccaccaggttgcggcgctctttttccgagatacgctgcaaatcctgaccgttaaactccagcttttccgccatcacgcggcccggataatcaatcagccccataatcgccagcgaactgaccgacttaccggagccagactcacccacaatcccgactacttcgccctgttttacgctgtagctaatgcggtctacggcgcggaacggtgcgctttcgtcgccgaaatgcaccgataatttatctacatttaataacgccatctcgaacctcttactgcttcagtttgggatcgagcgcgtcacgcagaccgtcacccatcaggttaaatgccagcaccgtcagcaggatcgccagacccgggaaggtcacgacccaccaggcgctttgcgcgaactgcaacacgtcggagagcatggtgccccactccggcgttggcggctgcgcccccatgccgaggaaaccaagagcagccatatcgagaatggcgttagagaaaccgagcgacgcctgaacaatcagcggtgcaaggcagttcgggaagatgttaataaacatctggcgcatcgccccggctcctgccacgcgagaagcggtgacgtaatcgcgattcacctccaccagcacggcggcgcgggttaagcgcacatagtgcggcaaggcaacaaaggtcagcgccagcgcggcgttaccaatcgacgggccgaaaatcgccaccagcaccagtgccaacagcagacttggcagcgccagcatgatatcgaccacgcgcataatgatgttatcgaccaggccgccgaagtaaccggcgatcaggccgagaataacgcccataatcagcgataacaccaccaccagacagccaaccagcagcgacaagcgcgcgccgtacatcagccgcgacagcacatcacggcctacatcatcggtacccagcaagtgcgccatgctgccgccttcctgccaggctggcggggcgagcagtgcatcgcggaactgttccgccgggttatagggagcaatccagttggcaaagatcgcgataaacagcacgatgacgacgtaaaccagcccgacgaccgcgcctttgttgcgtttaaaatagtgccagaactcctgtaaaggggtcatcggtaccggcgcgctaatcactttattttcagtaacctgtgacatgatgtccccttacttcttatgacgaatacgcgggttcaccacgccatacagcagatcgaccagcaggttgacgaggataatcatcgtcgccaccagcaatacgccgccctgcaccaccggataatcgcgccgttgcagtgcgtcaatcaaccagcgccccagaccgggccacgagaagatggtttcggtcagaatcgcccccgccagcaatgttcccacctggaggccgataacggtcactaccggcagcatcgcgttacgcagcgcatggacgataatcacccgcatgcgnntca

SEQ ID NO: 1544 - DNA, 7904 bp, Escherichia coli
  Strain O55:H7
  modified_base (1433)..(1433): a, c, g or t
  modified_base (5197)..(5197): a, c, g or t
  modified_base (6048)..(6050): a, c, g or t
gcggtgcggatgtaatcttcacccagcacttccagcatcgaggagcgtgtcatacgcacaatgaccgccagcggaatagtacccagcacaatggcgggcaagatcatatgggcgacggcatcgataaagttaccgtcttcaccccagatggcggtgtcgatcagcataaaaccggttaacggattggaatcatcgaggaacaccatatcgctcacgcgaccggagacgggtgtcaggttccagtgcaccgaaaccagcatgatcagcatcatgccccaccagaagataggcattgaataacctgtcagcgccaggccaaccgctgtgtgatcgaaaatggaaccgcgtttaaccgcggccagcacaccaaccggaatgccgaccgcggtcgcaaaaatcatcgcgcagacgccaagttccagcgtggcctgaaagcgcggcacgaactcttcccataccggaattcggcttttcattgaaatgcctagatcgccatgcataacgccccaaatgtaatggagatactgctgccacatcggtttatctaagccgagttcagccagcaactgcgcgtgacgctctggggagatcccacgttcgcccgccatgatcatcaccggatcgcccgggatcatgtggacaaaggcaaatgtgagaagggtaataccgataaacgtggggatgacgagtcccaaacgtcggagaataaactgcaacataacccggattctctgtagtgacccgcagcctggaactgcgtgtctgtattgctcacaaatcaattcccgcccaggtcgggcagggaatgaagtattgctgccggatggcgctgcacgcagaggcacagcaccaccgggtatggcttttaattattcgatagagacgttttcgaagtgatgtttgcctaatggatcaaccacatagcctttaacttctttgcgtaccggttcaaacacggtggagtgagcgatgatcagtgccggagcctgatcgtgcatcaccacctgcgcttgcttgtacagttcaacgcgtttgttatggtcgtcggtagcacgcgccggttgaatcagatcttcaaacggtttgtagcaccattttgagtagttggagccttgttcagaggcggcgcagctgaacagagtggcgaagaagttatccggatccccgttatcgccagtccagcccatcattaccgtctggtgctcgccatctttcgcacgcttgaggtactcaccccattcgtaggtgacaattttggcctgcacgccgactttcgcccagtctgcctgaatcatctccgccatgcggcgagcgttcgggttatacggacgttgtaccggcatcgcccacaggtcgatggagaaacctttttccagacccgcttctttcagcaaggctttcgctttttcaggatcgtaggtgtagtcctgaangtcgtcgttatagccccacatggttggcgggatcaggtttttcgctgatacacccgcgccctgataaaccgctttgatgatcgcgtctttgttcaccgcgtaggtcagagcctggcgaactttcacgtcatcgagtggttttttctgcacgttatacgagagataaccgacgttcagccccggcatttccatcaggttgatagatttatcctgcttcatgcgggcgatatctgccgggttcgggtacggcatcacctggcattcatttttctgcaatttagcgtaacgcacggaagcgtcaggggtaatagagaaaaccagcgtatcgatctgcggtttggtgccccagtagccatcaaacgctttgtagcggatacgggaatctttttgatactgctgtaactggaacggaccggtgccgattgggttgaggtccagtttttccggtgtaccggctttcatcatcgcatcagcatattcttttgacagaatagaggcgaagtccattgccaggtcagcgaggaacggcgcttccgggcgagtcagcacaaactgaacggtgttgtcgtccacctttttcacttcgctgatcagctccggcaagcccatgccttcgaagtattcgtagctgccgccagaaactttatggtacgggttttgcgcgtttttctgacgatcgaacgagaacaccacgtcatcggcattcatttcgcgcgtcggtttgaattctttattgtcgtgccacttcacacctttacgcagatggaaggtataggttttaccgtcttcgctgacttcccacttttcagcgaggcccggaatcacttcggtggtgccgattttaaattcaaccaggcggttataaagcggtacggaagaggcgtcataggtggtaccggaggtaaacagctgcgggttaaacccttccggagatccttctgagcaataaaccagagttttagcctgaacacttgctgcgacggtcatagccaccaggctgagaccaagcttcagcatccctgactttttcaaggaaatacgcattattctgctccaattgtgatgtttgttgttttaaccctttgcagtgggttgtcgctgcctgaccttttttgttttttgcccggtcgggtcaacgttatgaggtggggatgccgtactaattaacatcagtgtaacagtgcggatcctccataaaatgcccctcgtgacctacaatctgtcaacagaatgtgaaaacgtcaatacagccaaccgggatttacaccaacggtgagaatccacaaacaaagattaaaaaaacttcaaacagctatttgcagcagagaaatttgtgctactccaacatgaccagaacaatcagcttaatatttagcaacatttggtgattaagttttatgcatttagtgaaaaaaatctgaggaaaaggtggatatctgagcgattaataccatgaacgctaaaacgcacagcggaaaatgccagcgccagccataagtaacgcaaaaaaagatttaagcaaatataaaaaaagacaatggtttctgtcacaaatccgttaatggatagtgagatatggggcgcaaatttggcagggaaatgtgtggcgtgtaggtcgaataaggcgttcacgccgcatccgacaataagtgcggtgccgttgcctgatgcgacgctgacgcgtcttatcaggcctacgtcgagtcgaacctccctgcccccggaggttctcttcctcatgggctgcagatgcaaaaaagcctgctcgttgagcaggcttttcgaatttggtcggtgatagaggattcgaacctccgaccccttcgtcccgaacgaagtgcgctaccaggctgcgccaatcaccgaatgcggggcgcatcttactgcgcagatacgccctcgtcaatcccttaatagcaaaatgccttttgatcggcgagaaagtcagcaggcctcttagttagccgctgcctcttttgtctgcgggatgtgacaccagttgttgttttcgttaattccaccatccggtgaagtatagccaagacaacccatgatggtgtcgtacagctctacgtgacggcgtggcactttcatgtcggctgcttttttcagctgcgcaaacgcctgcgcattgaccggattttccagatatttatctgacatccagaccatcatcggtacgcggaactgctccggcggtgccagttcacgcggcgtgccgtgcaggtgctcgcgttcattaattgactcgccgtggtcagctgcgtagaacacaatcgctttcttatcgcgaacctgatcaatcacactggagataaagtgatccacataggtcaccgagttgtcataggagttgatcatctgcgctttggtacatccgctatcaacaccaatacattccggcttccactgcgcaaagctgcgcgggtaacgctgggtgtagttaaagtgcgaacctttggtatgcagaatgattagatgcttaccatccgggttgcgccccagcgattgctgcatttcgtctaccagcaacatatcatctaccggcttgccacggttacgtggctccgcaccaatctgttcacggtaagcaatattgtccgccatcgtattgctgtagaaccacatttcgctctgcatagcgtagaggtcagaactgaatcctaactgcttcagtaccgcgaaaatgttctgttcttttaatgtgcgctgcggattatcttccgcgcccccctgacgtacaaacatgcaacgcagagagagtttggttgcggtatcacaggagtaaccacggaacgccgccagatttttctcctgggccagcttcggcgtggtattacgctcatagccgaaaatgcccatatggtcccaacgcgtggtttcaccgatgataaacacgacataagtatcattaacattttgcggtgcctgataagtgaatttcttcgccgggttaagcaatgaattattatcggaagattcatcgacccgcgcccaggcgtacagccctaacgcagaaagccagtttgatggcagataagagttcgctacgacaccgccataactcggcaaatcaacgccggtcgccctctccactttcttctgctggatatccagcaaacgaatcggtgcccaaaccataattcccgccagtacgacgaccgccaggctgcgaatacgctgccctggggttcgcagttgtcggagcaaggtgtagcgacagcggttattccagataaggataagaggcaatgcgctaacggcgattaaccagagaataaagttcagaccaacaacttcttttgacaggtcgatatcggtggtcatgacggaagcgatgatgccataaccaatgaccacattaaggaaggtcatgtaatagctggcacctgcggaaaagagcacaaccagcgatgccagaatacgccagctgcggcggccaaacagcgaaagaagacgtagtaaaaagaaggtcaccagtacggtggcggccagttcaacaacagcagaaatgcctttccagacggtaaaatcgtgcgcatagctgccgaagcggcggtaaaaaaccgcgccattcataaaaaggccaatatagattgcaagcaaaaagctcagcttctgctgtgtaatcgatttgatgtatctcatgcaaacaaaccctggacaaacaggtgataacaccctgcttagcggcttttcaggcccagcaggggaaaagtgcggaggtagtcagataagtaaaatctacacgcgcgaaataagtngaccacagcaaagggaaaaagtgtggggaaagagtgtgcatgaagcacaaatttacaaaagtgcaagtccggaatagaccattttaacggattaaccgactattcagagataggttgggccaggatgctggcccagtaacttactcataggtgatggaaaaattgacaagggcattcgctgtgccaccagtggcctgagtgttgacgaccacataactcgcctggtagtgaagcgacgtggtttcgccatcaatcgcccattcaatcggcgttccgctggagcctttgggaacttgctgcgttcctttatcgtcctctatcttcaacgcaacacccgttgcgccaccagcctcaagggcaaacatggaatcatcatcgctgtccgactgactgtccatctcaacggtcgctttggatatcccatcgcactctttgagttcaatggtgaaatctttcttgctcaacaccgtaccgactgccgcaggtttttgcagcgtcattgttcccatatcgacttcgagatcgcttttttccatctcgcaagctttagtggtgatagtgatggagaaatgaatatcccctgccgggccaagatccgtcgccgcattcaccccgcaggcaaccagactcaaactggcgatgccgctatgcagcaatcgtttgaacttcatggcatcactccatttcaagatatatggtcgttacgccttcaaacgtcccgcctttaggcgctttacccgtcgtgctaatcggtaaagccagcagtcgaatcgcggcattgcggtgagttttagaatccaggctgctcaaatttaataacgtggtgctgcttgaatcattcggtaccaaannnttgccgctggaatctttcaccagtacgccaatatcggggttgcccatatccaccgctcggggatcgtcagcattggttgtcccctcaaggcgcaacgcaaccttgataccatcagagatattgttgcaatcgaagctgaggttaatttcttgctctgtcgcaccttcaggcatttgcccttgcctgtttttaaacgccgaggaggggaattcaccaaatggcacatccagcaccgtgccgggtttaatttcgcaatccagggttacggtgacacgcccctgaatagatacggaagatatgggtattgttccgtaatctttatttgttttcgaggcatacagttcggcaattaacgtcagagggatgacggaatcgccgataaagggtttagtaatagcaaaggaaagtagacctgcgccgcccatatagggcgtagtaatgactttgttgcatccggatgtttgcagcgcctgctggtttttgaaaggaacaaacccatacacactggtactgatgcgaattttcgtcgcaacctccagttcctccgtcaaagtataatatttcatactgtcaaccgtacggccagaagggggaagcatactcaccccctgcactagagtatctttttcattcttataagaatcaggacattcacaaattagcgatacgttttgtccattagaccagttaaggacatccggtaaaaccgttcctgcgacgttttttgccgcatcaggtataccaacatccacatcgacattatagtgataagtcgtgccatccgcgggggtacatggcccccacgcatctccggcaaatgccttgccagaaaatccgaatacgcatcctaataaggataatgctattgccgctttcatttcgctctccttgcttactggcaattggccgaaacaggaataattccgccctgttttaattccagggataatttataaggcgccacgcattgctgcgacgcgtcattaccccatttaatcaatacccgtccttcctctggcattccgctaatatagagctgtccttcttcaccaacgatactgctcacctcgttttgtttatcggtgattagcgttgccgttgctccaaagggcaccgggctgcccgcggaacgaagcagcgtcattaatacgcggtaaccaacgcgggtatcaaaacgcgctctgacaatcgctccacgcgttggcaccactttctggaacgcattttcaacgtcaacatcgtcacccaacgaatcgctacgcagtgagatttcgttttcacgatacggcatggcataaggcacgatcgcgttacccatccagtcaacctgaacgccgccgttattcaccacgcgggcattgcgcgcaccgggtacggagatgagcgtcatggtttcgcctagcggttgggaaagcgtcacgccttcgctatgaactatcacgccgccgcgaacgctgtagttgagctgccggtaatctttcccgtagctatagcctacgttgacattaccggacccaccctgatagccaacgttagcgttaccgctgttacccacaccgttgctggcgtagccttcctggacactgtagctcaggttgcgatcctcaagcagcgttccgctgaccccaacctgttgattggtacgaccatcctggtcggtcgtgacgcgatagttactccaggcccggcctagtggaacggaaatattgaaagaccacaagcgatcgctttcatcccattcagggcttttattccagctatatgcaatactgtaactgaccttgccaatacgtccgttgtaacccgccgataccgtgttctgtttacctgcgtcgttccagtaatcctgctgcg

SEQ ID NO: 1545 - DNA, 2360 bp, Escherichia coli
  Strain O55:H7
  modified_base (1118)..(1119): a, c, g or t
  modified_base (1667)..(1667): a, c, g or t
  modified_base (2358)..(2359): a, c, g or t
tttaaataaacagagccataggcccctaattgctgcgtcaggttaccctgtatttcgctgcgcttgtgataacggttatagtcgctgtcagcgtcactgcgcacatcggtggcttcctggaaggtatagaaaccgctggtaaagtaccgatagcccgcaaggcggaaatcggtgccgctttcgaagctcttggaatataagaaacgataagattgtccctggctatcgcgatcgttattcagttcgcttttagcctgcgtcacatcaatggaaatcgccccgatataaccaaagtttttccctatccctaatgcaaatgcattgtaattattagagattaatacgccgccgtaggccgtcatcccccacggtaaaccgtagatcagatcaagctgcccgaaacgcggcgaggcgctgtcataattcccggcctgatattcacctgcggcaaagctatatttgagatggccttcacgctggaaaattggcaccgatgagaatggctgaataaagcgttgttcactgccatccgcttctttaataatgaccgtgagatcaccgctgtttgcagtggggtaaagatcgtttatttcaaaggcaccaggctgcacataggtgcgataaataacgtagccgttttgttcaatactgacttcggcgttgcttttggcgatccctcgaacgatgggtgcaaagcctcgctggctgtcgggcagcatctcttcatcagaggctaacatcgcgccacgcatctgaacgctgtcaaaaatgtcccccgcggtcgccgtatcccccattgttaattgcgctttgaaagggatgatggccctactcaaagacgtaccgatattatcccactgcgctttgccaccggaatggctccaggtactgtaattccgtaaccgccaagcgccaaggttcagcccgctgcgtaagttgaggtagtagctgtcgctctttagcgtatctttaccatcatcatgatgaacagtgccattatcatcgacataactgctggaagaccccgtcgagtcatattcactgttgctcccgctaaaactgtaatccagcagcaacgcagggataccttcgtcccataaagattccggcaccgtgcnncgcgccacctggtgcatcgccgcctgagggaaacttaataccagcttttgttcactgaagtcgaaatggcttgaggccaggggaatgatttcgtcaaacggtacgcaggcttcggcagacaccagattgagggccggaaagctttcaacgcgcacgcccatctctgccagttgcgtccggctaaggcaaggcacaagggattcccccatcgctttgcgctgtgcttctgtggcctctttaaattccagtgtgcgggtttccattctctgttcattgacgtaaacagagacacgatagatgccgggtaactgctgttcctggcctttttcgaacatcgttaaatcgacatgctggcccacaccctgaacgtcctccaggaatttggggttaaactttccggcatgtgcagaaaacgtgctggcaacagcaaccgccaccacagagatagaaaaggaagaaaaagtacgtgaaacggtcttccgtgacattgagctatttctcctgaaaagatattaatcaatcaacatttttagtgatcatttccgctnacgatccaaagtcattgatggtgttatatttaattttagaaacgctacctaccccggcgggtaatgtgatatttaatgcccctttagcgggtaccatgcctgctttttcaatttctttgtcattcgcaaaaaattgattaaaggtaatattaaaaactgtcggattatcaacgcggagctgattaccgttacgcgtaaatcgcagttcatttggcgcggtttttacatcaccctttaaacctgccgggcgataaaaaagtttgattcgggtgcgaacggcaatctgcaaaacatttttgttttcgctgtcgtcacttttagatggaatggctttcacattaacccagtagaccgattcgcgatcctgaggcaggccgggcgtaatattcacaatacgcaaaatattgttcttttctggatcaagcttgaatagtgggggcgtaataataaacggtgtttttttgctgcccgcggcatcatccacccaggattggataagaaactcttccgtcttacttttattctgtacggtcagcgaggcttctttcttactgcaatcataaattacgcgagtagagctaagtccgacgccacccgccagaactgactgtgaaaggaacagagagagagccaacgcaacaaatttacttttcatcattcgatccatgaactttgacgactaatggcggcnnt

SEQ ID NO: 1546 - DNA, 645 bp, Escherichia coli
  Strain O55:H7
  modified_base (255)..(255): a, c, g or t
cgccatttgtaaaacggacgattactcgtaagacaggttgaaatcgacctgcgcattgccgtaaccggtcgttaccgttgccagagtagaaacgtagttagcggtaaagtagagaaccgtctggcctttactcagatcaactcttgctttaccaccgttaagagcgaccagggtattgctgttatcataaataccgataccaacacctttggccgcgcccgcttcagtgctaacagaaatcagatcagatttatntgcatcaccaacaccactaaagctcacattggcttttttcatcgtggtggtatcgcaatcttccagtttgatttcgaaaggttttgccggggatttgtcaccaaccgcagcaaatacagatttttgtacctgacccaacacaacttcctggttctgagagtcaacggacagtacgcaaggtgaatccacgatctcgcctgtaaatttaaccgtgccgtcaccagactctgctgcgaatacagtgccagaagttaacgccagtgcggttaaggcaaaaacgacctttttcatgaaaaactccatttaaaaaattacattaaaaagaaaatcttgatgtattaaaatcgacaactttgaaggaaggattatacaatgaaatacgaataataa

SEQ ID NO: 1547 - DNA, 79 bp, Escherichia coli
  Strain O55:H7
  modified_base (72)..(75): a, c, g or t
  modified_base (77)..(78): a, c, g or t
aatagcgcatccaatttcaaatcttaaaaaaatcattgcattacactttcacataaaaagctatcgtttatnnnnanna

SEQ ID NO: 1548 - DNA, 62 bp, Escherichia coli
  Strain O55:H7
  modified_base (40)..(40): a, c, g or t
aatataaaatatcaattaaacaaaacaaaaacattcaccncgcaaataataagataaaatat

SEQ ID NO: 1549 - DNA, 2493 bp, Escherichia coli
  Strain O55:H7
aaaaaaggaggatttcctccccctttcgttcaaaacctgtagtttctggctaaatatgcgcctcacgcaatactttctgctctggctgacgaatcgtcgtagaaagcgccaatgacagaatcagcagagcaaagatgacgtagaacgtcacatagaagccgccaaacagtgaggcgataatcgaaccacaaatgctaccgataccgaaaccgaggtaaatcacaccgtagtttttcgccaggttattgaggccgaagaactcactgaccagtgacggaaagacggtaatagtgccgccaaagttaaatgccacgcaggcaatcgctgcaaagaacgtcactgcattcaatggtgcaaacagcagggccgccatacccaccagcgaaattacctgaccaatggtgataacacggatacgggcgattttgtcagacagaatgcccagcaccagacgacctgaaaggttggcgatggaaataacagtgactgcattggctgcagaaaccacatcaaggtgtgccagactttgggcgatatctttcgctaccccaatcacgtacaggccgctcatgcaggcagtcaggaacattaccgctaacatccagtactgcggtttacgcatcgactctgccagcgtgtaatctttctccaccacaccattgctggttttcacttcctgttttggtgcgtctttcattaacgttgcgccgaaaacaatcatcaccagcgcaatcgctccccaaatcacaaaggttttttccagaccgaccgtttccagcagctgcgtgtcgataaatttgaaacccaggctacccagaccataagaaccgatagcgaacgcggagatcagacctttacgctccgggaaccatttcacgcagttagagagcgtcagcaggtaacccgcgccatccgccagaccgaccagcacaccggcgcttaaccacagcatcatcaggttgtcagaatgcgctgtcaggaagaaccctaatcccagcaaaatgccggaagcgatggtgacgcgtttaacaccaaaacgttcctgcaatttgcccgcaacagaagacgatattgccagccccagacttaacaagccgaaagagaaagcgacctggcttaccggcgcatccagcttggcggaaagcgcgccgttaaacaggctccaggtataaaccgaccccagcgcaaactgggtaatgatagtaccgatgagtgtcaaccagcgggtacgctgataatttgaaggtgtcatggcagtattcctgcagtaataaaaaggaaaaatctctgccgacaaccataacgaagtgcactttatgcctggggaaaaacggcatgaaatgccatcagaacggaatgaaatgccttagttcaggaatgaatgacgcgacaattattcaccaaatttattatttggtaagttagcacccactatcgccacaactattgttattcaatggtttcaattgtgattgttacgttaaaatctggcactaacccccatcgtatacagataatcgctattgttagtggtattttctgcctgagatagcgcggcataggcggcaatattttgattgagcaacatatcagcgcctacggtgacatccagccagttgccgttctggtttgtcgccgtcatccggctcaggcctgattgcgccttccagatattctcgccaaattgctggttatagctgatttgcgcccagggtcggagatcgccaagccgggagtcaacacgccagcctaaggtactcacgctggcatgccataacggatcggtcagcgtggtagtactgtcgccaaactcgttatacatcgaggtggttgtgccatcgtaatgtaatgccgcgaccgggccagttgtaacctgttcatataaaggaaaattccagcccatactcatactgctggtcacatccacaggggtttcttccgccagattgacttccagtcccagcgccctttggctactttgaatacgttgcgacaaaatatcgttgtaatcaggttgatgatcactatcccaggtgtaacgctctgtggaatgcccgggttgcgtatcaacgatatattcttgttgccaggcgtaagctgtgttgagaaaaaaggcactgattaccacactcgccagcaggcttagctgccagcgaccaccgcttttttttatgatcattaacacgactccagggaagagccgaattcggcaatattattgtcattgtatgaaggatatcgggcatagtagccctgtattaaatattgactttttcaccgatgcgtcaagaaaagcggctgaaatttttacgatcgggtacatagcgagggaaagtatggaacgttgcggctgggtgagtcaggacccgctttatattgcctaccatgataatgagtggggcgtgcctgaaactgacaggaaaaaactgttcgaaatgatctgcctggaagggcagcaggctgggttatcgtggatcaccgtcctcaaaaaac

SEQ ID NO: 1550 - DNA, 1389 bp, Escherichia coli
  Strain O55:H7
aactatcgcgcctgctttcatcagttcgatccggtgaaggttgccgcaatgcaggaagaggatgtcgaaagactggtacaggacgccgggattatccgccatcgcgggaaaattcaggcaattattggtaatgcgcgggcgtacctgcaaatggaacagaacggcgaaccgtttgccgactttgtctggtcgtttgtaaatcatcagccacaggtgacacaagccacaacgttgagcgaaatccccacatctacgcccgcctccgacgccctatctaaggcactgaaaaaacgtggttttaagtttgtcggtaccacaatctgttactcctttatgcaggcatgtgggctggtgaatgatcatgtggttggctgctgttgctatccgggaaataaaccatgattcgggaagcgcaacgttcagaactccccgcgatcctcgaactgtggctggaaagtacaacctgggggcatccctttataaaagtgaattactggcgcgagtgcattccgctggtgcgggatgcgtatcttgccaatgcgaaaaactgggtctgggaagaagacggtaagcttctcggttttgtcagcattatggaaggccgatttctggcagcaatgtttgtcgcaccgaaggccgtcagacgcggtattggtaaggcgctgatgcagtatgtgcagcagcgctatccccatctgatgctggaggtttatcaaaaaaatcaaccggcgatagatttttaccaggcgcagggttttcacattgtcgattgcgcatggcaggatgaaacccaactacccacctggattatgagctggccggtggttcaaacgctgtaagtgtcagttccggaccgttgtatttttctagccatgccagcgccgtattacccgcacagccattccccagccgcgagctggggagatctttggtcagcacgttcactgcgccgtttttacaaataccgtcagcggttaaatccagatccggccatgccccttcgtgaatgcaaatcacgccaggtttaattccctcgctaatgaccgctccggcaagaatttgcccgcgtgcgttccacagccgaacagtatcgccatcttgtatgccgcgcgcctgggcatcgtcaggatgaatggtgacaggctcacggtttgccaccgcgtacaattcgcgcagagaactgtaattcagctggctgtgcagacgatgcgccggatgagcagaaagtacctgtaactgttccggttcggcattgccctgccattcgtccggcaccagccacattggatgccccgggcaatccggataagcgtaatcggcaatacgctgcgagaagatttcaatcttaccgctggcggtttttaatggatgcgcctgcggatcgcggca

SEQ ID NO: 1551 - DNA, 18856 bp, Escherichia coli
  Strain O55:H7
  modified_base (527)..(527): a, c, g or t
  modified_base (1560)..(1560): a, c, g or t
  modified_base (5726)..(5727): a, c, g or t
  modified_base (7387)..(7387): a, c, g or t
  modified_base (8252)..(8252): a, c, g or t
  modified_base (8254)..(8254): a, c, g or t
  modified_base (11284)..(11284): a, c, g or t
  modified_base (12416)..(12416): a, c, g or t
  modified_base (14247)..(14247): a, c, g or t
cagcgaagcgaataaaccgctcgctgtccgggttttccggcatctcaattaactggttggcttgccagaactcagtaaatggcggcaattcaacctgctggcttgccccgcgctgccgggcaacgttataaaacgtttccagccattgcagctcactttttccttccgtaaaacgtgcataaccgcccttctcccagcgttcacttaactcggcaaaaacatcaaaatcattacgcgcttcatagcgtggcggcaccacttgcttcatcggcaccagatgctgattactgtaatcaccggtcatggtgagatcattacgctcaaaagaggtagtcgcaggcagaacgatatccgcgtgttttgccgccgccgtccagaagcattcagagatcaccaccagctccggtttttgccaggcacggatcaggcgattggtatcctgatgatgagtaaagttggcaccgcccgcccaccagataaaacgaatatccgggaaatgtcggtccataccgttgtgttgatatgcnccaccggggttttccagtgcttcaacaatgcgggcgacagggattttatctaccgcatcgcagccacccggcaagctgccctgcatggaagagagtaccgcagcgcgccgcgtggggttaccaccattggcaaaatggtaagaaagaccaaaaccgccgccgggtgtgccgatttgccccaacattgctgccagcgtgacgatcatccagtgtttttgctcaccaaactgttggcgctgcattccccagccagccatcagcatggtggtattttggtggaaaatagccgccagctcgcggattttctctgcgttaacaccacaaatctctgctgcccattcggcggttttcgctattccgtcactctcgcccagcaaataagaggcgaagacggcataaccggtggtgcaacgcgccagaaacgcttcgtcgtgccaaccattttccaccagcgtatgggcgatccccagcatcagcgcaacatcagtgcccatgtgcggtgccacccactccattttatcgccaaagaaatcgacggtttccgatcgcattggatcaatgcagatcagctttttcccgctgtcacgcagtgcagaaaagtaagaaagcccctgctcatcggatgcattccacgcaattttcagcgtattgagtgggttagcactccacagcaccacgacatcgctatgttccagcaccagcggccaactggtctgctgttgataaacttcactaccacccacgacatacggcatgatcgcctgtgccgcgccggtcgaataatcccccagatgcccggtataaccgcctgccagcgccatatagcgttgtaataatgtcgaggccttatgcagcacgccgtttgaacgccagccgtaggaaccagcaaaaatcgatgccggaccataagcctcacgaatgcgtttatgttgttggtgaataagatccagcgcctcatcccaactcacgcgaacaaattcatcctgcccacgaatgccttgcgggttttccggtgacgcgagaaagcctttgngcaccattggaaatcgtacccgcgtattgctgtgaacctggtcacgaaccgcgctctgcaaggagttttccattcctgtggctaacgcgccacgcgagctaaacacggtttcgccgtcggtttcaaccagcatgggcccccaatgggcggcagtcagaacggaatatcgtgaggatgagttggtcaaaccgaagactcctgaaaggttagatgtattgagcagttaaatattacttacaaatttccgagtattcccaggaataatcttcatgttcacgcggcataatctcccgccacggaacccgtggcaaagaataaaaaggttattaaggattaacaatgaagaaacgtgtttatcttattgccgccgtagtgagtggcgctctggcggtatctggctgcacaactaacccttacaccggcgaacgcgaagcaggtaaatctgctatcggcgcaggtctgggctctctcgtgggcgcgggtattggtgcgctctcttcttcgaagaaagatcgcggtaaaggcgcgctgattggcgcagcagcaggcgcagctctgggcggcggcgtgggttattacatggatgtgcaggaagcgaagctgcgtgacaaaatgcgcggcactggtgttagcgtaacccgcagcggggataacattatcctcaatatgccgaacaatgtgaccttcgacagcagcagcgcaaccctgaaaccggcgggcgctaacaccctgaccggcgtggcaatggtgctgaaagagtatccgaaaacggcggttaacgtgattggttatactgacagcacgggtggtcacgatctgaacatgcgtctctcccagcagcgtgcggattccgttgccagcgcgttgatcacccagggcgtggacgccagccgcatccgtactcagggccttggcccggctaacccaatcgccagcaacagcaccgcagaaggtaaggcgcaaaaccgccgtgtagaaattaccttaagcccgctgtaatccctttcatgccaggtgatgcagaaatcacctggcattcttcagttttccttcatcatatttcaggctaaggtgatcgccttatcagtgaatggagagaagcatgaagccgtccgttatcctctacaaagccttacctgatgatttactgcaacgcctgcaagagcatttcaccgttcaccaggtggcaaacctcagcccacaaaccgtcgaacaaaatgcagcaatttttgccgaagctgaaggtttactgggttcaaacgagaatgttgatgccgcattgctggaaaaaatgccgaaactgcgtgccacatcaacgatctccgtcggctatgacaattttgatgtcgatgcgcttaccgcccgaaaaattctgctgatgcacacgccaaccgtattaacagaaaccgtcgccgatacgctgatggcgctggtgttgtctaccgctcgtcgggttgtggaggtagcagaacgggtaaaagcaggcgaatggaccgcgagcataggcccggactggtacggcactgacgttcaccataaaacactgggcattgtcgggatgggacggatcggtatggcgctggcacaacgtgcgcactttggcttcaacatgcccatcctctataacgcgcgccgccaccataaagaagcagaagaacgcttcaacgcccgctactgcgatttggatacactgttacaagagtcagatttcgtttgcctgatcctgccgttaactgatgagacgcatcatctgtttggcgcagaacaattcgccaaaatgaaatcctccgccattttcattaatgccggacgtggcccggtggttgacgaaaatgcactgatcgcagcattgcagaaaggggaaattcacgccgccgggctggatgtcttcgaacaagagccactttccgtagattcgccgttgctctcaatggccaacgtcgtcgcagtaccgcatattggatctgccacccatgagacgcgttatggcatggccgcctgtgccgtggataatttgattgatgcgttacaaggaaaggttgagaagaactgtgtgaatccgcacgtcgcggactaagccgcgactgcgtggagtaaagcccgataatcgctcgggcttttactctttattgggttgcagtaactgctgtagtccaggcctgattaaacgcctgatgttgtgccggtaatggcgcaatcagtttgttatattcacttgcctgctgtgaagtcgggaactggatgccatttgctacaaagctcacctgagtaccttgttgggcaatgtagtctccaaccatcaccagttgttgcgtgaaagtttgtgccgccggaatcaacggttgcaatgcatcagctggcgtcgttaccactttggtgaatgcctgatcaaagaccggtttcaggtcatcactctgttttagcgcagagtgcgcagcatcggcctgcaacttcgcattttgcagttgttgcgccagcacacccagcgaaccattcatttcacgcagcggaccgctttgcgtaacgtaatcctgcggtacgcgaattgcgttaacgctgtctacaaccgggcgcagaccggaatccatcgcctgattcacctgctgagaataaccatacagaatcgcgtaatcagagacaaaaggaccaaactgttttttctgatcggcagtcagggttggtagacgttcaccgctacgcatcactgtattctgcaggaagtcgataaacgctttacgctgatcgccttctttatcaaaacacccactcaggctaactaccattaataacgccgcaagaggcgcaaaccagcgagagcaggactttcctgtcgccattttcttactcctttcacccaaaaaaagcgcacaacgacacacgcgtgtctgacgtgacaaggatagtccaggacaggcttgcaggataccctttctacgtaatcttcctggtaaaatcatggagaaaatgaaacaaggttaatttgttgtttcattgttaaaaaatgatattgccgttgccttttttgtagccagagatttacgccttcgcagaaggttagattttcgaaatctttacaaaccaggagtggttagagatatatcggcatttatcagatcgttaggtggctataagtcacgctaaatgactggctgaatcgaatcatagccagagcatgccctgacttcaccccgctgtgtctgcttttcccgactattcttaatgagcttcgatgcaattcacgatcccgcagtgtgatttgaggagttttcaatggaatataaagatccaatgcatgagctgttgagcagcctggaacagattgtttttaaagatgaaacgcagaaaattaccctgacgcacagaacaacgtcctgtaccgaaattgagcagttacgaaaagggacaggattaaaaatcgatgatttcgcccgggttttgggcgtatcagtcgccatggtaaaggaatgggaatccagacgcgtgaagccttcaagtgccgaactaaaattgatgcgtttgattcaagccaacccggcattaagtaagcagttgatggaatagacttttatccactttattgctgtttacggtcctgatgacaggaccgttttccaaccgattaatcataaatatgaaaaataattgttgcatcacccgccaatgcgtggcttaatgcacatcaacggtttgacgtacagaccattaaagcagtgtagtaaggcaagtcccttcaagagttatcgttgatacccctcgtagtgcacattcctttaacgcttcaaaatctgtaaagcacgccatatcgccgaaaggcacacttaattattaaaggtaatacactatgtccggtaaaatgactggtatcgtaaaatggttcaacgctgacaaaggcttcggcttcatcactcctgacgatggctctaaagacgtgttcgtacacttctctgctatccagaacgatggttacaaatctctggacgaaggtcagaaagtgtccttcaccatcgaaagcggcgctaaaggcccggcagctggcaacgtaaccagcctgtaatctctgcttaaaagcacagaatctaagatccctgccatttggcggggatttttttatttgtttttcaggaaataaataatcgatcgcgtaataaaatctagtattatttttnngaaaaataaatttgggtgcaatgagaatgcgcaacgccgtaagaaaggcgggaataactttccgccgaagactcttactctttcaaattgcaggctaaaaatgccgccagctcataactcccctgtttaatatgcaattcacacagtgaatctcttatcatccaggtgaaaaataaaagcgcgaaacaaatcactattaaagaaagcaatctatatttctgcggcattcccagccccctgtgttgatttccaacgagtaagaggctaaccttatggtgtctatacatagaggggcctcactttgatttatagtcaggtggggcttttctctgtctgcctttcggtgaatacctgagacaaacagtctcaagcacccgtggctattctagcttaataagtttgtttcttctccttgatataatcctaaaaaaatctcataaaattaatatatgagataatctttattcagcagaagattattaaaggttgctgtattatttagcgataaaaaaagcctgccagatggcaggctttttaataacggcgttattactgcaacagcgaaatatccgcaacgcgcaggaacagttcgcgcagtttctccagcatggtcagacggttgatacgcaattctttgtcatcaaccatgaccatcactttatcgaagaaggcatcgactggttcacgcagctctgccagttcgaccagcgcatcctggtaacgaccttccgcaaagtacggctccagcttgtcacgtagcaccacaacctgcatcgccagtttaatttcttccggctctttcagagtagaggcattcacgcgatcgctcagcacttcgtcagatttcgccaggatgttagatacacgtttgttcgccgccgccagtgctgcagctgcttccagggtacggaagtgcgataccgctttcatgcgggcatcgaaatcagccggacgagtcggacgacgcgccagtaccgcctggatggtgtcaacggtataaccttcgtcctgataccaggcgcggaagcgaccgagcataaagtcgataacatcatcaactacgttggcattagtcagcttatcgccatacagacgcaccgcttcttcggtcagcgtttgcagatcaaggttgaggttcttctcaacgataattcgcagcacgccaagtgcggcacgacgcagcgcaaacgggtctttgtcgcctttcggatgctgaccgataccgaagatacccgccagagtatccatcttatcagcaatcgccagcgcacaagctaccgggttggacggcaggtcatcaccggcaaagcgcggctgatactgctcattcagcgcgacggctacgtcttccgcttcgccatcgtgacgcgcgtagtgcatccccataacgccttgggtgtcggtgaactcgaagaccatgttggtcatcaggtcacacttagacagcaggcccgcacgggttgcgtggttaacgtcagcgccaatctgttcggcgatccagccagccagcgcctggatgcggtcagtcttgtcacgcagcgtacccagctgttgctggaacagcacggtttgcaggcgcggcaggttatcttccagacgttttttacggtcggtgttgaagaagaactcggcatcagccagacgtggacgaacgactttntcgttaccagagataatttgctgcggatctttcgattcgatgttggcaacgaagataaagttcggcagcagtttgccgtcgttcgcatacaccgggaagtacttctggtcacctttcatggtgtaaaccagtgcttcagacggcaccgcgaggaatttctcttcaaatttcgcggttagaacgaccggccactccaccagcgaagccacttcttccagcaggctttcgcttaagtcagcgttaccgccaatcttacgcgctgcttcttcggcatcggctttaatcttcgccttacgttcttcgtaatcggcgatgactttcccacgctcacgcagaatttccggatactgatcggcgttatcgatggtgaattccggctcgcccataaagcggtggccgcgaatcacgcgatcggactgaatgcccagaatggttgcaggaatgactttgtcgcccagcagcagggtcacggtgtgcaccggacgcacgaagtgcacgtcgcttgcaccccagcgcatcagtttcggaatcggcagtttcgccagcgaagtcgcaaccatattcggcagcagtgcttcagtgctttcgcccttcacatgggcgcgatacagcagccattcgcctttatcggtagtcagacgctcagcctggtcaacggtaataccgcaaccacgcgcccaaccttctgccgctttgctcggtttgccttcagcgtcgaacgcctgggcaatcgccgggccgcgtttttcgatttcacgatccggttgcgcttccgccaggttagctactttcagcgccagacgacgcggagcagcaaaccattgaacggtgccgtgtgcgaggcctgcgttatccagctccgcantnaagttcgcagcaaaggactctgccaggctgcgcagtgcttttggtggcagctcttcagtgccgatttccaccagaaaagttttctcagacatagccgcctcttacttatctttgttgcacatcgggaagcctagggcttcacgggaagcgtaatatgcttctgccactgctttggtcagggtgcgaatgcgcagaatgtagcgctgacgctcggtgacggagatggctttacgcgcatccagcaggttgaagctgtgggcggctttcagaatacgctcgtaagctggcagcggcagcggattttccagcgccagcagctgctgcgcttctttctcgtactgctcaaagcaggtgaacaggaagtccacatccgcgtattcgaagttgtaagtggactgctccacttcgttctgatggaacacgtcgccgtaggtggttttacccagcgggccgtcgctccagaccaggtcgtaaacgctgtctacgccctgaatgtacatggccagacgttccagaccgtaggtgatctcgccggtaaccggtttacactccagaccaccaacctgctggaagtaagtgaactgcgtcacttccatgccgtttagccacacttcccagcccagtccccaggcacccagcgtcgggttttcccagttatcttccacgaaacggatatcgtggatagtcgggtccatgcccagctctttcagagaaccaaggtacagctcctgaatattgtccggcgatggcttaatgaccacctggaactgatagtagtgctgtaaacggttggggttttcgccgtagcgaccatcggtcgggcgacgagaaggctgaacataagcagccgccatcggttctggccccagcgcgcgcagacaggtcattgggtgagaggttcccgcgccgacttccatgtccaatggttgaacaatggtgcagccctggcgagcccagtaatcctgtaaggtcaggatcaagccctggaaggtcctggtatcaaacttttgcatattatttcgtgctggatacgtgtggatttaaaggaagggatcagtatacccgctggatggaagatatacagtatgaaacgggaaaaagcagggcttaacgcatggaaagatgcaaaaaatggccatctgcgtcaaaagaacagacaaactgctctttacggaaggtataaccgcgcatttcatagcttccctggaactgttcgaaggcggtgacgtcgattttttgctcgccggtgttataacgttttgccgcctgatccttgcataacgcttccatattcaacgaacgcagaggatcaacctttacccgttgtgctttctgcacgggtgacggtgtagaacaacccactagcaccataagcgccattgccggaaagaaagagttcatcatcattaaattaccgtctggtttgcaggtgagtcttattatttatatcggtatagtggctgatatcttacgaatttccttaagcctctataagctgtagtgttaaaactcagattattccagtgcgccaactgaatgatttatcggtcagactttttttaaccagatacagagacacagatgcagcccaaaatttactggattgataacctgcgagggatagcgtgtttaatggtggtgatgattcacaccactacctggtatgtgaccaatgctcatagtgttagccccgtcacctgggatatcgccaatgttctgaactctgcctctcgtgtcagcgtgccgctatttttcatgatttccggctatctcttttttggcgaacgcagcgcccagccgcgccatttcttgcgtatcggcttatgtctgtttttttatagcgcaatcgcgctgctctacattgcactgtttacctccattaatgtggagttagcgctgaaaaacctgctgcaaaagccagtgttttaccacttatggtttttcttcgcgattgcggtgatttatctggtttcaccgctgattcaggtgaagaacgtcggcggaaaaatgttgctggtgctaatggtggtgattggtatcatcgctaacccaaacaccgtgccgcagaaaatcgacggttttgaatggctgccaattaacttatatatcaatggcgatactttttactacattctgtatggcatgttgggccgcgctttagggatgatggacacacagcataaagcactgtcgtgggtgagcgccgcactgtttgcgacgggagtttttattatctctcgcgggacattatatgaattgcagtggcgcggaaattttgccgatacctggtatctttactgtgggccgatggtttttatctgcgcaatcgcgctattgactctggttaaaaacacgctggatacgcgtaccattcgcggacttggcttaatctcccgccattcgttgggtatatacggattccacgccttgattatccatgcgctgcgcacccggggaattgagcttaaaaattggccaatactggatattatttggattttttgcgcgacgttggcagcgagtttgttactttctatgctggtacaacgaatcgacagaaacagattagtgagttaagtaaaagcccggtcacattggactgaccgggcttacgtgagttattcgctgtattcttcctgggtaacctgtgtttcttttggtgggtttattccggcatcacgaatatttttctgcaccgctactgcaccaaacaagcttaagaagaaagccagtccataaaaacctttttcgctgagtaataatgtcgcattccacagacctaccatcagtaatgcaacagagataataaagacagtcaggcaggtcatataataaatggaagtggtcggtatgccttcatacttgtcccgaacggtcttttgataagacgccgcagaaaacagtcctaataccagtacggcaaaataatatcctttttcatttaactgcatctctgcattccatagccctaacagataggtaacgataccaccaacgagagctatccatgacacaatactaaaggccggngaataggttgatattttgttgtccatcacagtattcctttcattcctgaatgtgtaagagctttatgttgctcataccgagcgaaacaaacgcatttgaccaaacaagcagacaaaaaaggcgatggggtagatcaccatttcataagcattgataggtgcatttaaaacaccgataaacaagagaccgatagtgattaacgcaactaactggcaaatatgggtaaaaaaattatccagttgcccgagtttttctgcgcgaagatatgcatagttgccaaaagttgctgtcattaacacgccaagaaaatagccttttccactcaacaatgggcatgagatccatagcccaaccagataaaccagcgccccgacaacaaataatagttttgccacagtttttgaggttttcataacgatctccatatctaccagcgatacattacgagtaaccaacgaaagacaaaactgaaaaatgccattaacaaatgattttcagaataaattcatactaaatattaattaattgctgagatatatagatgtgaattatcccccacccggtcaggcaggggataacgtttacgccattaatggcagaagttgctgatagaggcgacggaatgtttcacgtcgtggctgataagcggcataacgctgcgcatctggtagatgcgactgttctaacggtagttgcggcaacaactcaatgagcgatttctctggattcgccgcaatctgcgccagccttgctgcgcccagtgctggccccacatccccccccgtacggtaatcgagctgctgaccgctgatatccgccagcatctgacgccagtactcactacgcgccccgccaccaatcaacgtaacactttgcggtttaatgccgcaggcatgcacgacatccatgccatctgccagcgcataacccacgccttccagcactgctcgcgccagttcattggggccatgttgatgagtcaaaccaaagaaaacccctttcgcctggggattattgtgtggtgtacgctcgccggaaagataaggcagaaaccaaactggctcggcactttcatcagcctgttgagctgcagcgattaaagctgggacattgctcaggccggttaatttcncggcccaatccagacacgacgctgcactcagcattacagacattaaatgccaacgctgcggtagcgcatggcaaaagctgtgtacggcgctttctggcttgcttaagaacccttcgctgacagcaaaatagacccccgacgtccccagcgataacattgcctgattagcatcaaccattcccacaccaactgcaccagctgcattgtcgccaccgcctgcgacaactggcaccgtcgccataccccacgctttcgcaacttcaggtaacaaagcaccagtaatttcgctgccttcgtataatgcgggcatctggtcacgagataagtcgcaagcctgcagcatgacgtcactccagtcacgctttgcgacatccagccacatggtgccagctgcgtcagacatatcgctggcaaactcccccgtcatacgcagacgcaagtaatctttcggtaataatactttgtcgatttgacggaatatctccggctcatgccgctgaacccatagcaatttaggcgcagtaaatccgggcatcatcaggttgccggtaatcacccgcgatagcggaactcgcgcttccagcaaagcgcactcttgcgcacagcgcccgtcgttccacaaaatggcagggcgcaatacccgttgttgagcatccagtaaggttgctccgtgcatctggccggcaatacccaatgctttaacgtcctgcagagaatgctgatcgcccagagctttcattgcgcgatcagttgcctgccaccactgttccgggtcttgttccgaccagagtggatgcgggcgcgaaacggtcagcttttccgtttgcgaagcaaccacctcaccctgctcgttgagcaaaataacttttacgcccgaggtgccaagatctatcccgatatacatatcgatcgttccttaaaaaaatgcccggtatcgctaccgataaccgggccaacggactgcacagttagccgttatttgtcgaacagataatgatttaccagattttccagttgctcctggcgaccactctgatgcaccggagacaaattatgttcctgagcatatttggctaaatctgccagtgacatttggcctttcaggatttgctggcccaattcgctattccagccggaataacgctgcgcgatgcgtttatccagctcgccatcttcaatcatgcacgctgcaattttcagcgccagtgccatcgtatccatcgcgccgatatgaccgtaaaacagatcatatttatcagtactttgacgacgtactttggcatcgaagttcagaccaccggtggtgaaaccgcctgctttgagaatttcatacatcaccagcgcattctcttccacactgttcgggaactggtcggtgtcccagcccagttgcgcatcgccacggttggcgtcgacagaaccgaacaggccaagcgcaatggcggtggctatttcatgatggaaagagtgacctgccagcgtcgcgtggttagcttcaatgttcagtttaatctctttttccagaccaaactgtttcaggaagccatagactgtcgcagcatcgtaatcatattgatgtttagtcggttcttgcggtttcggttcgataagcaacgtgccctggaagccgattttatgtttatgctcaaccaccatttgcataaagcggcccagttgttcacgctcctgacgcaaatcggtatttaacagcgtttcgtaaccttcacgaccgccccacaggacatagttttcaccacccaatttatgggttgcttccatcgctgtaacaacttgcgttgccgcccagctgaagacttctggatctgggttngtcgccgcacccgcgccatagcgagggtttgtaaagcagttagcggttccccacagcagcttcacgccgctctcttcttgcttgcctgccagaacatcaaccatttgcgcaaaattattgatgtactcttttaacgacgcgccctcaggagaaacatccacatcgtggaagcaataaaatggcacatgtaacttgtggaaaaactcaaatgcgacatctgctttacgcttcgccaacgccagtgcctcaccaggctgctgccacggacgattaaacgcccccacaccaaacatatccgccccgttccagcagaaggtgtgccagtagcaggcggcaaatcgcaagtgctcttccatacgcttgcccaacaccagttcgtcgggattgtagtgacggaatgctaacgggtttgaggattttgagccttcataacgaacgcgatcgagctggtcaaaataggcttgcatattgaactccataatcaggtaatgccgcgggtgatggatgatgtcgtaatattgggcactccctttcagttgctcaattatgttatttcacactgctattgagataattcacaagtgtgcgctcgctcgcaaaataaaatggaatgatgaaactgggtaattcctcgaagagaaaaatgcaataagtacaattgcgcaacaaaagtaagatctcggtcataaatcaagaaataaaccaaaaatcgtaatcgaaagataaaaatctgtaattgttttcccctgtttagttgctaaaaattggttacgtttatcgcggtgattgttacttattaaagctgtcctctaactacagaaggccctacaccatgaaaataaagaacattctactcaccctttgcacctcactcctgcttaccaacgttgctgcacacgccaaagaagtcaaaataggtatggcgattgatgatctccgtcttgaacgctggcaaaaagatcgagatatctttgtgaaaaaggcagaatctctcggcgcgaaagtatttgtacagtctgcaaatggcaatgaagaaacacaaatgtcgcagattgaaaacatgataaaccggggtgtcgatgttcttgtcattattccgtataacggtcaggtattaagtaacgttgtaaaagaagccaaacaagaaggcattaaagtattagcttacgaccgtatgattaacgatgcggatatcgatttttatatttctttcgataacgaaaaagtcggtgaactgcaggcaaaagccctggtcgatattgttccgcaaggtaattacttcctgatgggcggctcgccggtagataacaacgctaagctgttccgcgccggacaaatgaaagtgttacaaccttacgttgattccggaaaaattaaagtcgttggtgaccaatgggttgatggctggttaccggaaaacgcattgaaaattatggaaaacgcgctaaccgccaataataacaaaattgatgctgtagttgcctcaaacgatgccaccgcaggtggggcaattcaggcattaagcgcgcaaggtttatcagggaaagtagcaatttctggccaggatgcggatctcgcaggtattaaacgtattgctgccggtacgcaaactatgacggtatataaacctattacattgctggcaaatactgccgcagaaattgccgttgaattgggcaatggtcaggagccaaaagcagatacctcactaaataatggcctgaaagatgtcccctcccgcctcctgacaccgatcgatgtgaataaaaacaacatcaaagatacggtaattaaagacggattccacaaagagagcgagctgtaagcgttacgccccagcgcggagcgggggcgtgatttctctccatgccgcgtgaatgaattggcttaggtggagtcgctatgccttatctacttgaaatgaagaacattaccaaaaccttcggcagtgtgaaggcgattgataacgtcagcttgcggttgaatgctggcgaaatcgtctcactctgtggggaaaatgggtctggtaaatcaacgctgatgaaagtgctgtgtggtatttatccccatggctcctacgaaggcgaaattatttttgcgggagaagagattcaggcgagtcacatccgcgataccgaacgcaaaggtatcgccatcattcaccaggaattggccctggtgaaagaattgaccgtgctggaaaatatcttcctgggtaacgaaataacccacaatggcattatggattatgacctgatgacgctacgctgtcagaagctgctcgcacaggtcagtttatccatttcacctgatacccgcgttggcgatttagggcttgggcaacaacaactggttgaaattgccaaggcacttaataaacaggtgcgcttgttaattctcgatgaaccgacagcctcattaactgagcaggaaacgtcggttttactggatattattcgcgatctacaacagcacggtatcgcctgtatttatatttcgcacaaactcaacgaagtcaaagcgatttccgatacgatttgcgttattcgcgacggacagcacattggtacgcgtgatgctgccggaatgagtgaagacgatattatcaccatgatggtcgggcgagagttaaccgcgctttaccctaatgaaccacataccaccggagatgaaatattacgtattgaacatctgacggcatggcatccggttaatcgtcatattaaacgagttaatgatgtctcgttttccctgaaacgtggcgaaatactgggtattgccggactcgttggtgccggacgtaccgagaccattcagtgcctgtttggtgtgtggcccggacaatgggaaggaaaaatttatattgatggcaaacaggtagatattcgtaactgtcagcaagccatcgcccaggggattgcgatggtccccgaagacagaaagcgcgacggcatcgttccggtaatggcggttggtaaaaatattaccctcgccgcactcaataaatttaccggtggcattagccagcttgatgacgcggcagagcaaaaatgtattctggaatcaatccagcaactcaaagttaaaacgtcgtcccccgaccttgctattggacgtttgagcggcggcaatcagcaaaaagcgatcctcgctcgctgtctgttacttaacccgcgcattctcattcttgatgaacccaccaggggtatcgatattggcgcgaaatacgagatctacaaattaattaaccaactcgtccagcagggtattgccgttattgtcatctcttctgaattacctgaagtgctcggccttagcgatcgtgtactagtaatgcatgaagggaaactaaaagccaacctgataaatcataacctgactcaggagcaggtgatggaagccgcattgaggagcgaacatcatgtcgaaaagcaatccgtctgaagtgaaattggccgtaccgacatccggtggcttctccgggctgaaatcactgaatttgcaggtcttcgtgatgattgcagctatcatcgcaatcatgctgttctttacctggaccaccgatggtgcctacttaagcgcccgtaacgtctccaacctgttacgccagaccgcgattaccggcatcctcgcggtaggaatggtgttcgtcataatttctgctgaaatcgacctttccgtcggctcaatgatggggctattaggtggcgtcgcggcgatttgtgacgtctggctaggctggcctttgccacttaccatcattgtgacgttggttctgggactgcttctcggtgcctggaacggatggtgggtcgcgtaccgcaaagtcccttcatttattgtcactctcgcgggcatgttggcatttcgcggcatactcattggcatcaccaacggcacgactgtatcccccaccagcgccgcgatgtcacaaattgggcaaagctatctccccgccagcaccggcttcatcattggcgcgcttggcttaatggcttttgttggctggcaatggcgcggaagaatgcgccgtcaggctttgggtttgcagtctccggcctctaccgcagtagtcggtcgccaggctttaaccgctatcatcgtattaggcgcaatctggctgttgaatgattaccgtggcgttcccactcctgttctgctgctgacgttgctgttactcggcggaatgtttatggcaacgcggacagcatttggacgacgcatttatgccatcggcggcaatctggaagcagcacgtctctccggaattaacgttgaacgcaccaaacttgccgtgttcgctattaacggattaatggtagccatcgccggattaatcctcagttctcgacttggcgctggttcaccttctgcggggaatatcgccgagctggacgcaattgcagcatgcgtgattggcggcaccagtctggcaggcggcgtcgggagcgtggctggagcggtaatgggggcattcatcatggcttcactggataacggtatgagtatgatggatgtaccgaccttctggcagtatatcgttaaaggtgcgattctgttgctggcagtatggatggactccgcaaccaaacgccgttcttgattttga

SEQ ID NO: 1552 - DNA, 12212 bp, Escherichia coli
  Strain O55:H7
  modified_base (2960)..(2960): a, c, g or t
  modified_base (2976)..(2976): a, c, g or t
  modified_base (6090)..(6090): a, c, g or t
  modified_base (12098)..(12098): a, c, g or t
ttctcaaagccggtaacgtattaccggttttgagtttttgcatgattcagcaggaaaagaaccatgtttactaaacgtcaccgcatcacattactgttcaatgccaataaagcctatgaccggcaggtagtagaaggcgtaggggaatatttacaggcgtcacaatcggaatgggatattttcattgaagaagatttccgcgcccgcattgataaaatcaaggactggttaggagatggcgtcattgccgacttcgacgacaaacagatcgagcaagcgctggctgatgtcgacgtccccattgttggggttggcggctcgtatcaccttgcagaaagttacccacccgttcattacattgccaccgataactatgcgctggttgaaagcgcatttttgcatttaaaagagaaaggcgttaaccgctttgctttttatggtcttccggaatcaagcggcaaacgttgggccactgaacgcgaatatgcatttcgtcagcttgtcgccgaagaaaagtatcgcggagtggtttatcaggggttagaaaccgcaccagagaactggcaacacgcgcaaaatcggctggcagactggctacaaacactgccaccgcaaaccgggattattgccgttactgacgcccgggcgcggcatattctgcaagtatgtgaacatctacacattcccgtaccggaaaaattatgcgtgattggcatcgataacgaagaactgacccgctatctgtcgcgtgtcgccctttcttcggtcgctcagggcgcgcggcaaatgggctatcaggcggcaaaactgttgcatcgattattagataaagaagaaatgccgctacagcggattttggtccctccagttcgcgtcattgaacggcgctcaacagattaccgttcgctgaccgatcccgccgttattcaggccatgcattacattcgtaatcacgcctgtaaagggattaaagtggatcaggtactcgatgcggtcgggatctcgcgctccaatcttgagaagcgttttaaagaagaggtgggtgaaaccatccatgccatgattcatgctgagaagctggagaaagcgcgcagtctgctgatttcaaccaccttgtcgatcaatgagatatcgcaaatgtgcggttatccatcgctgcaatatttctactctgtttttaaaaaagcatatgacacgacgccaaaagagtatcgcgatgtaaatagcgaggtcatgttgtagcgatgatgagaattgtcggcgtcgcatcaggtaactcagcacaaccacctgatgcgatcaaaagccttatccgaccgacaagtcggataaggctcgaggaaatacaattacatatgcgccgcgattaaccgttggttatcctggtacattgcgaacaggtagttgttataactcttccctttggtcgagtagcccttcagcttgtgaatcatcgctgtggcagtcacttcctgatcagctttacgcagctgcgcacgcgatttacggaacgaagagtaagccggatgcgtattgaggttagtgacataggcgctcaccgattctttgacagaactaaactgtgagtaccctttcactttacctggcgcattggtacaacgtcctttcatgcatttcatgccgaaaagattgttgttgttgcgcgccagcttcgacgttccccaaccgctttctgctgcagccatcgtcgccaccatactggtagggataatgtctacgcgttcaagcaaggtattccacgggatttttcgcgtattaccagaccacttcaccttgtagcgtttggcgatgtctttcagacgcgcacgctcagcaggtgaccattggccctgatactgttttgaaatcagccagttacgttctgcagtaatggctgcattttggctggtaatgtaaggcattacggtccggagaaacgcctttttccttggtgttccggaagggtattttcgcaaatcaggaagtgaactactctttgcactattgcgagaatactcttgtttactgcttacctgtttattactagctttagttaagtgggacttttgactcgctgttgttgtgtgcgtcttcgctaacacctcactcgaaaacaccagagtgagtaacataagaatcatcgccccatatcgtcgtatgggagtcaaaatcatcaggtctcctggtcggatttaatcattccaacaccttatatttttcacaaatttgagagttgaatctcaaatcatatcaaaaatagctgtcaagagcaccccaaggaatagtccaaatctgaaactatgtcacgagttaacgattcagattggcgctaaatcgcagaaaatgtggggtttatcgcaaaattcagccgttttttgcgcgcgatcgctcacccttgcttctcatcctgtggacttaccgctcagggatgagttttgtctggcttatcgctggcaaactgtctgaaatcgcagcaataaggactcatccaccatgaaactcgccgcctgttttctgacactccttcctggcttcgccgttgccgccagctggacttctccggggttccctgcctttagcgaacagggaacgggaacatttgtcagccacgcgcagttgcccaaaggtacgcgtccactcacgctaaattttgaccaacagtgctggcagcctgcagatgcgataaaactcaatcagatgctttccctgcaaccttgtagcaacacgccgcctcaatggcgattgttcagggacggcaaatatacgctgcaaatagacacccgctccggtacgccaacattgatgatttccatccagaacgccgccgaaccggtagcaaacctggtccgtgaatgcccgaaatgggatggattaccgctcacgctggatgtcagagccactttcccggaaggagccgccgtacgggattattacagccagcaaattgcgatagtgaagancggtcaaataacgttncaacccgctgctaccagcaacggtttactcctgctggaacgggcagaaactgacgcctctgcccctttcgactggcataacgccacggtttactttgtgctgacagatcgtttcgaaaacggcgatcccagtaatgaccagagttacggacgtcataaagacggtatggcggaaattggcacttttcacggcggcgatttacgcggcctgaccaacaaactggattacctccagcagttgggcgttaatgctttatggataagcgccccatttgagcaaattcacggctgggtcggcggcggtacaaaaggcgatttcccgcattatgcctaccacggttattacacacaggactggacgaatcttgatgccaatatgggcaacgaagccgatctacggacgctggttgatagcgcacatcagcgcggtattcgtattctctttgatgtcgtgatgaaccacaccggctatgccacgctggcggatatgcaggagtatcagtttggcgcgttatatctttctggtgacgaagtgaaaaaaacgctgggtgaacgctggagcgactggaaacctgccgccgggcaaacctggcatagctttaacgattacattaatttcagcgacaaaacaggctgggataaatggtggggaaaaaactggatccgtaccgatatcggcgattacgacaatcctggattcgacgatctcaccatgtcgctagcctttttgccggatatcaaaaccgaatcaactaccgcttctggtctgccggtgttctataaaaacaaaacggatacccacgctaaagccatcgacggctttacccctcgcgattacttaacccactggttaagtcagtgggtccgcgactatgggattgatggttttcgggtcgataccgccaaacatgttgagttgcccgcttggcagcaactgaaaaccgaagccagcgccgcgcttcgcgaatggaaaaaagctaaccccgacaaagcattagatgacaaacctttctggatgaccggtgaagcctggggccacggcgtgatgcaaagtgactactatcgccacggcttcgatgcgatgatcaatttcgattatcaggagcaggcggcgaaagctgtcgattgtattgcgcagatggatacgacctggcagcaaatggcggagaaattgcagggtttcaacgtgttgagctacctctcgtcgcatgatacccgtctgttccgtgaagggggcgacaaagcagcagagttattactattagcgccaggcgcggtacaaatcttttatggcgatgaatcctcgcgtccgttcggtcctacaggttctgatccgctgcaaggtacacgttcggatatgaactggcaggatgttagcggtaaatctgccgccaacgtcgcgcactggcagaaaatcagccagttccgcgcccgccatcccgcaattggcgcgggcaaacaaacgacactttcgctgaagcagggctacggctttgttcgtgagcatggcgacgataaagtgctggtcatctgggctgggcaacagtgacttttccggcttcccgttcgtcagtacctcgggaagccgccaaccaggataaaatgtcagccctaatcagcgttgcaggataaagcaccgctcactcttcaacagaccgatttgcaccccagcaaatgtagcgttattgttaccttccttgctacagagttcgacagatatcccgctatgacattctccctttttggtgacaaatttacccgccactccggcattacgctgctgatggaagatctgaacgacggtttacgcacgcctagcgcgattatgctcggcggcggtaatccggcgcagatcccggaaatgcaggactacttccagacgctactgaccgacatgctggaaagtggcaaagcgactgatgcactgtgcaattacgacggtccacaggggaaaacggagctactcacactgcttgccggaatgctgcgcgagaagttgggttgggatatcgaagcacagaatattgcactaacaaacggcagccagagcgcgtttttctacttatttaatctgtttgccggacgccgtgccgatggtcgggtcaaaaaagtgctgttcccgctggcaccggaatacattggctacgctgacgccggactggaagaagatctgtttgtctctgcgcgtccgaatattgaactgctgccggaaggccagtttaaataccacgtcgattttgagcatctgcatattggcgaagaaaccgggatgatttgcgtctcccggccgacgaatccaacaggcaatgtgattactgacgaagagttgctgaagcttgacgcgctggcgaatcaacacggcattccgctggtgattgataacgcttatggcgtcccgttcccgggtatcatcttcagtgaagcgcgcccgctatggaatccgaatatcgtgctgtgcatgagtctttccaagctggggctgcctggctcccgctgcggcattatcatcgccaatgaaaaaatcatcaccgccatcaccaatatgaacggcattatcagcctggcacctggcggtattggtccggcgatgatgtgtgaaatgattaagcgtaacgatctgctgcgcctgtctgaaacagtcatcaaaccgttttactaccagcgtgttcaggaaactagcgccatcattcgccgctatttaccggaagatcgctgcctaattcataaaccagaaggagccattttcctctggctttggtttaaggatttgcccattacgaccgagcagctctatcagcgcctgaaagcacgcggcgtgctgatggtgccggggcacaacttcttcccagggctggacaaaccgtggccgcatacgcatcaatgtatgcgcatgaactacgtaccagagccggagaaaattgaggcgggggtgaagattctggcggaagagatagaaagagcctgggctgaaagtcactaaaaattgcctgatgcgctacgcttatcaggcctacatgatttctgcaatatatttaatttgcaagaatttgtgggccggataaggcgtttacgccgcatctggcataaacaaagcgcactattccggcgttgaganacgccggaaaaacgtttcaaacaggctgctgccgtagccgatgccgctgcactttctcgacatccatgcactgcaacgcctttgtcgggcaggcttcaacacaggccggtcccgtctcccgatgccagcacagatcgcacttaatcgccctcgcctttttgcgcgaagaaacgacctccatcgcaccaaacgggcaagccagcatacagcttttacagccaatgcaacgtgtttgttcaacgaaaatatgcccatgttcgcggcttatcgcgtcaacagggcagacattcgcgcacggtgcatcttcacactgatgacaggctactgccgtggtccagctgtggtctttaatgacacgaatacgggaaataaactcgtctggtgacaacgcagcgcaatcctgattctcctgatgcgacactgcgcaagccacttcacaggtacggcaaccgatacatttcgtcgcatccgcaataataaaccggttcatgatcactcctttgcactaaaacagcagagtgccagagagcgcgtccctactgctttgatccaacgaaggaaatgttaaagttttggcacttgtccaaagcgttatgtgatcgcgccctggtcgtccctgacagtaaatcccagttcattagaaatagcctgcgcggtttcacgcagtggtttcaggagatttttctcccccacctgtttcagacgtgatgtcgaaagcgaaatcgccccggcactacgaattgatatgttccttgctgtaacgccgcttccacgctgctggcgttaaaccggtgtgtttgcgaaaaatctgccggaaatagccaacgtcattaaacccgcacaacgccgccacttccgtgagcgatcgcgcttcgctaattaacagcttttcggcttcgcgcacccgctggcgatggattgcttctgttaacgtcagatgaaacacccgccggtagacgcgcccaagataatcggcattgcagtacagctcgcgggccagaagcgccgtagaaagcgggcgatgatattgcgtgcggatcagtttctgcgctttccaggcaagggtggtgcctgctccatcggcctgttcatcaagacgcgcgtcacgggtgagctgctgcaaaatgagcagcacaataaactccagcgccggagtgcgttgatgcttttcctgttcgcttaagaactggcgaaacagggccaccagcgcctgcggatcgacaaccttcgtttgttgcggcacgctaagatgagtaagccagcgagggtcgttgtccggcgctttaacctcaaaatgcagccagtaaaatttgagatcggcgggaaaatcctccaccccaacatgttgtcggttcggccagagtaataaactctctcccgcatcgaccagaaatatccgttcttcttcctgaatcgttaatcgacctttttcgacaaagataatttcccatgactccagccgccttgcaggatgcctccctacgccacgggaaataaataatccaccattttgcactttaatcggtaacgtcatggataattcgagcattgatatgtaatttcccgcttattcattaatgattaaacacattaccttttgattattaatcaaaaacattaatttcacctgatccatttcacacttttaaattcaggtcggaatcgtcacctttttttactcttttctcgccttgttgatattcccgttcacggcagaattaatcaggtcatttcaataaaactaaaaattgctccctattcacgaggaatatctatgacctctacaccgattactaccgctgatatcgctaaaggtaaaattgacgatgcgttatctgtacgggaaaaaataggctacggcctgggtgacgcaggcggcaccgtaataacttgcctgatcatgaattttctcacctttttctacaccgacgtttttggattaactccggcgctggttggcacgctgtttattgcactgcgcgtgtttgatgccatctccgacccggtgatgggcgtcattgccgaccggacgcaaagccgatgggggcgctttcgtccgtggcagctatggattgccattcctatcggcattatcggcatcctgacgttcaccgtgccagatgccagcatgggagtaaaaatcgcctgggcgttcggtacttacctgctcctttcagtcggttataccgccatcaacgtaccgtactgcgcgctgatcaacaccatgaccacccgccacaatgaagtgatctcctgccagtcctggcgattcgttctctgcggcgtagcgggatttctggtttcggtaggcttaccgtggatggtagctctcttcggtcagggcaacgctgcacgcggctatcaactgggcgtcggggtattgtgcgccattgccgtggtgatgttcctgtgctgtttcttctgggttcgtgaacgggtgccgctctccacaatggggaaatttaccctgcgcgaacatcttgccgggctgcggaacaacgaccaactgctgctgatgctggtcatgtctttcctgctgattaacgtctttaacattcgcggcggtgggtatatgtacttcattacctacgtcttacaaggcagcacgggctacacgtcgctgttcttcaccatggtcaccttcgcctccattatcggctcggtgattgtcagcccgttaacgcggcgtttcgataccgtcaaaatttattactacaccaacctgctcctcgctgcactggcggtgttgatgtggttcctgccctccggcccggcttatcaaacgctgtggctggcggtgatcctcggtaatggcgtgattcttggcttcacattgccactgcacttctcattgatggcctttgccgatgactacggcgagtggaaaacccacgtacgttcttccggcatgaacttcgccttcaatctgtttttcatcaagctggcctgggcctccagcgccgggatcatcagcctgctgtttatttttgtcgcctaccagcctggcgtggaaaaccagaccgccagttcgcttggcgggatcgcggcgatggaaacattactgcctgcgctattccacctgctgctggcaggggcgatccgcttttgcaaactcaataatcctatgatgtcacgcatagctaccgacctgcgtcagcgtcatgtacagccttaaggagcacaagatgaacatttcggaagtcgatctgcataaactgacggtcagcgatccgttcctcggtcagtaccaacaactggtccgcgacgtggtgattccttatcagtgggatgccttgaacgatcgtatcccagaagcggaacccagccatgcgattgaaaactttcgcattgccgccggacttcaggagggtgaattttacgggatggtgtttcaggacagcgacgtcgccaaatggctggaagcggtagcctggtcgctgtgccagaagccggacgccgaactggaaaaaaccgccgacgaggtaatcgaactgatcgcctccgcccaatgcgaagacggctatctcaatacttactttacggtaaaagcacccgaagaacgctggagcaatctggcggagtgtcatgaactttactgcgcaggtcatctgattgaagccggagtcgccttcttccaggccacgggaaaacggcgcttgctgggggtcgtttgccgcctggccgatcatatcgacagcgtatttggtccagatgaaagtaagttacacggttatcctggtcacccggaaattgaactggcactaatgcgcctgtatgaagtgactgaagagccgcgctacctggcgctgacgaactattttgtcgaacagcgtggtgcgcaaccgcactattacgaccaggaatatgaaaagcgcgggcagacatcgcactggcacacctacggcccggcgtggatggtgaaagacaaagcctacagccaggcacatttgccccttgcgcaacagcaaaccgccatcggtcacgcggtacgttttgtctatctgatgaccggcgtcgcgcatctcgcgcgtttaagtcacgatgacagcaagcgtcaggactgcctgcggctgtggaacaatatggcccagcgtcagttatatattaccggcggcatcggctcacaaagcagcggcgaagcgttcagcagcgattacgatctgccgaatgacacggtttacgccgaaagttgtgcttccatcggcctgatgatgttcgcccgacgaatgctggaaatggaaggcgacagtcaatatgccgatgtgatggagcgcgcactgtacaacactgtgctcggcggcatggcattggatggcaaacatttcttctatgtgaatccgctggaagtacatccaaaatcgctgaaattcaaccatatctacgatcacgttaaaccgatccgccagcgttggtttggctgcgcttgttgtccgccaaatatcgcccgcgtgctgacctcgattggtcattatctctacacgccgcgtgaagatgcgttgtatatcaacatctacgcaggaaacagcatggaagtgccggtagaaaatggcacgctgcgcctgcgggttagcgggaactatccgtggcaggagcaggtgacgattgcggttgaatcgccccagccggtacgtcatacgctggctttacgtctgccggactggtgcacacagccgcagatcatattgaatggggaagaggtcgagcaggatattcgtaaagggtatttgcacattacccgcgaatggcaggagggcgatacgctgaatctgactttgccgatgccggtacgccgcgtttacggtaacccgctggtgcgtcacgtcgccggaaaagtggcgattcagcgcggcccgctggtgtattgcctggaaaaggccgacaacggcgagtcactgcataatctgtggctgcccaccgatgcgccatttacgacatttgaaggcaagggattgtttagccataagatcttaatccaggcaccgggttaccggtatgaacagagcaatccagagcagcaaccgctgtggcattacgacagcgcgccagccaaacgccagacgcaaactctgacctttatcccgtggtttagctgggccaaccggggtgaaggcgaaatgcggatctgggtgaatgaggaaaagcattgccatccgtaggttggataaggcactcgcgccgcatccaacgtaaggagcacattgcctgatgcgacgcttaacacgtcttatcaggcatacaagtcggtgcgagagcgtaggccagccgcaccgacatccaccggtgaattaaaaacgccagctcacgccggtgacaaaggtaaaactctcattacgatcaatcatcgggctgtcggtaatctcttccggcagctcgctgtatcctgcgctcgccatcaatacgacgtgctctcctatcgggtattttgccgtcaggctgacatagggcacccaggcatcctgcgcggaataacttgccagaccgctacgacgggactcactctctgaaatgccatagtaatagtcactgaaattctcgtcataatagagaacgcccagcgcaggtgtcagcgacagacgacctatctgcattttgtggaataccgatagctcccccacccagccgttgctgttatccagaacgtccgcagctgcagaggctttcacggttccccaacgctcgtggtgataccaagcaacccccgccatagccgtactatcacgcttatcaagctgttgcatggcataatcgtcattatcggcagggtcaaattccagcggcatccaggatgcggtcaggctaagttcatttttttcactttgcgacagaataaaacctaacgtggtctgacgaacataaaaagaatcaccttcataactaatcagcggaattgcctttgtattttcattataaccgcgataaggcgattcattataagccgcaccagcaccaatggataattcagaagcagttgcgcttgccataaaaggcaacgcaaataacgccacaanattgcggttaattaacatgtccggtattccattttaaaataagataaaaaagagtcggcatagtaatgcttacaatttctccggtgcaagattcatatttatatagtaatatat

SEQ ID NO: 1553 - DNA, 7382 bp, Escherichia coli
  Strain O55:H7
  modified_base (2)..(3): a, c, g or t
  modified_base (6040)..(6042): a, c, g or t
  modified_base (7307)..(7307): a, c, g or t
anntaattgggctgttgcgatgacaaaattacaacttaagtaccgggagttaaaaattatctcggtaatcgctgccagtgaaaatatcagccatgccgcgactgtacttggcatcgcacaggccaacgtcagcaaatatcttgctgattttgaatcaaaagtgggtttaaaagtctttgaccgaaccacccgacaactgatgctcacaccttttggcaccgcgctattaccgtacatcaacgacatgctggacagaaacgagcagcttaataattttattgcagattataagcatgagaaacgtggtcgggtcaccatctacgccccaaccggcataattacctatttatccaaacatgtaatcgataaaattaaagatatcggtgatatcaccttatcgctaaaaacctgcaatcttgagcgtaatgccttttatgaaggcgtcgaatttcctgatgattgtgatgttttaatcagctatgccccaccaaaagatgaatcgctggttgccagttttattacccaatatgccgtaaccgcttatgccagccagcgctatcttgagaaacatcctattagccgtcctgacgaactcgaacatcactcctgtattttgatcgactcgatgatgatcgacgacgcgaatatctggcgcttcaacgtcgccgggagtaaagaggtgcgggattatcgcgtgaagggaaattacgtttgcgataacacgcaatcggcgctggagctggcacgaaatcacctggggattgtgtttgcgccagacaaaagtgtgcagagcgatctgcaagacggcacgctggtgccctgctttcagcacccgtatgaatggtggctggatctggtggctatcttccgtaaacgggaataccagccctggcgggtccagtatgtgctggatgaaatgctgcgtgaaattcgccaccagcttgctcagtcgcagcaactgcggcctgaacaagcggcggaaagcgaagattaatgatcgagataaaggtaatgcacccagctggtcatgcgtaataacactttgcgcatcaccgagacatggctgaaatgatcagagtagaccgccacctgagcgtaaataccgtctggtaaagcgctcaaatcagtgtgctcattcagttcaatggtcgcgataacgccatctgaacccggcgctgtgtttaacgtctgtaaggtgccggtcgactgataagctccgccgggaacagctggactaatggctgccagcttaccgctgaacactttgcctggcagagcgttaaataccacttccgcatcatcgccgggagccaggcgcagcaaggagttctgacggaactgcgccacgatttgtcgtttctgatcgggtataaacaccatcaccggacgtagcggcagcgacgcggcataggtacccggacgaatcagcacttgggtcacataaccatcgctcggcgcacgcactatcgtctgctcaaggttatattttgcttccgcgagctgcgctttcaggctggcgatttgagaatgttcacccaacaccaggctatccagctggctctggatctgtttttgttccgccgccgatgactttacggaggcttcctgcgccagataattttgccgtgccacatcaatatcgcgttctgaaaacgggtttactttcgcctggctgccgcgtgcgtaacgctggtactccttagcgaatttatcccgcgtggcctttgccttctgagtattcgccgccatctcatctaactctgcgcccaacgcccgctgtttatgttctgcggtaacgatatccgccatcagccgatccacccgcgcctgataacgcgtcgggtccagtcgaaatagcacctcaccttttttaatcagcgtatttttcttatccgtcacttctatcaccacgcctgtcacctgtgggacaacaggaatagaaataaccgctttttgcgctttaaaggtatacggatggttatagttcattaacagaattagaccgctgacaataaatattccacccagggccgctgtgggaatggtccatttatttacgggaattttgaagatcttaaacattgcccatgcaaaagccacataggtcaaaataatcagtaaatccataagtattactcggcagaagaggatttgatgtcggcgagctgtttctccagcccggcaatgcgctgttgcagttgcataacggatgaatcatggctttgcattccccatccccgctccgggcggtaaagcgtggcccaaatccacaaaaatggccagataacatgcagcgtaaaaagactcacccaaccagcaacatgaatggcgtcggcatgaggatgattacgttttttagcaatcaggtagggaatatcatgtaaaataataatcccatagaatatcaccagaaatacaaaaataagcactcccagtgcaaaatagtccaggaacatatttccctcagagaatataaaaaagaacaattaacgcatattatgaaatgccatgatgcaatgcaatttccttatttatataacgacatattgttttttatatactttctgaagtgtgctgcgtggctttttaacaggtcgaggcttatcatattgaaataatggaactatcagccaaactaatgaataacttcagtaaaacatccacaatgcagattaagcgtattaaaccttcaataatctaccgtttattgctgattgtcctcggaataccaatggtgatttacggtctggtttgcccgctcaccatcgaaacgcgagattaaactcctggcaaaacacgccccagaaacgcacttttgttggcgtagtctgggttattgcacacgtaggtttaaaacgtaaattgtaacaacgtgcgctttgtttatgccggatgcggcgtgtacgccttatccggcctacggtcaggtccccataggcatgataagacgcgtaagcgtcgcatcaggcaattaatacccgatgcgaccagcttcttacatcagaacagccccaacggtttatctgagtagctcactagcaggcacttggtttgctggtaatgctccagcatcatcttgtgggtttcgcgaccgatacctgattgtttgtagccaccaaacgccgcatgtgccgggtaagcatgataacagttggtccacacgcgcccagcctgtatgccgcgccccatcttataggccagattaccgttgcggctccagacgcccgcgcccaggccatattgcgtatcgttcgccagctccagcgcttcttccatcgttttgaaggtagtcaccgccagcaccgggccaaaaatctcctcctggaacacgcgcatattgttctgaccaaacagaatcgtcggttcgaggtagtagccgtctttcagttcaccttccagcagcttgcgccgcccgccggtgagcacatcagcgccctcttttttaccgatatcaatgtagttgaggatggtttccagttgcccgtgagaaacctgcgcacccatttgcgtcacgctgtcgagtgggttaccgctgcgaatgctttcgacacggcggatggcgcgttccataaagcgttcgtagattgactcctgcactaaggcacgactcggacaggtgcaaacttcgccctggttaaaggcaaacagtgcaaagccttccagcgctttatcgaaaaaggcatcttcttcatccatcacatcagcaaagaagatatttggcgacttaccgcccagctccagcgtcaccggaataatgttttgcgtggcgtattgcataatttgttgacccacttccgttgagccggtaaacgccactttggcgatgcgtttcgaggtcgccagatattcgccaatttccccacctgcaccgttgaccacgttcaccacgcccggcggcagtaaatcaccgacgatttccattagcagcagtacagaaagcggggtaagacgtgcgggtttcagcaccacacagttgcccgccgccagcgcgggagccattttccagctcgccatcagcagcgggaagttccacgggataatctgccccaccacgcctaacggttcatggaaatgataggccacggtttcgctatcaacttcactgatcccaccttcctgcgcccgaatacacgaggcgaaatagcggaaatggtcaatcgccagcggtacatccgcagcactggtttcgcgaatgggtttgccgttatcccaggtttcagctgtcgctaacagctcgaggttttgttccattcgatcggcaatcttaaacagaatcgccgcgcgatcctgcaccgaggtgtgcgcccatttatctttcactttgtgcgcagcatccagcgccagatcgatgtctcgtttgcccgaagacgccacttcgcacagcagctgcccggtcaccggcgtcaggttctggtaatactcaccatcggcaggggctacccattcgccgccaataaagttgtcatagcggttttttaacttgagggggaaaccatactcgccgggcttaatctgtgctgaagggggattattggtcatgatcgtctccttgcggtgtgaggtataacaagggtagacgtggctggcgaaatcttcgccagtcggtaacagcttttcgacggctatcacgaatttacgggcaagggttacagcggataatgcgcgaagtacacggcttgctggtcattaattttcttctcttgcgcaaacccttctttaacaattgtccgtaaatcagctcgagccgtattatcagagacgcccaggctcgcgctaatttcagcaactgtgtactctttccccggattggcgagcatcacattcaggagcgttacctggcgcggattcaggcgtttaagcacaccagagctaaacagcacactatcgagttttgcgcttcgttgtgtaatttcatcgatatgctgctgccagttttgcagagcacgtttaatgacacccgcctgatattcaaggaaataagtcagatccataccatctgattcagtgtactggtagctggcggcatatttgaccggtgcagcatgaagcaaacggctgatggaaatatatttaaagacatcgtagcccgatttcagcatataccagtaaaacagcgcccgactggtgcgcccgttgccatcccgaaacggatgttcatgggccagcataaaatgcagaatgcaggcacggaccaacggatgaatatacccttcatggctgtttaaccactggcaaactttttccagccgttccggtaacaatgccgcagcgggcggttgatgcactatattgccatcatagtcggcgatcacaacatcatctgtttcacgaaattctcccggacgatatttcgcgtcattgattccacccataccaatggcatgtaactggcgaataagcgcaggtgtcagcggttctgcgagtaagtgcggaatttccgccatcagccgggcatttcccgcaatcatatgctcgtcttcagtgcgtggcgaccgtcctgtttccagcatttttctcgccaccagcgttgtagtattcgcaccttccagctgggagctggtgatcggctcttccaggcgtaactggcttaactcggctccggccccgcgtaaccgttcagtctgatctttcagcgccagcgcggtagcacgtttgtcgacaagctcgcacgcttctgcaatcaccggggtaatgttgaatccggcctgttcacccgcttcattgcaataattaattcgttggatcgccgcgttgcgcgccagacgggtaagcgtccacgccacatcgacgttttctccttttttgatgcggtactgcaactcatcaaaaggcagataacgtcctttttcatcggtaacccggttaaagcgcaggtgggcctggagttcctcacccgataagtgtgataaaggaatcagcgtgggaggtgatttgatagccatttgcttatctcaaaaaagcgcaatattgagatagtgtatagcaggaaagagaaactatctcaaaaaaagcaagttttgagatagttgaaaaaatggcnnncaatttgccagccgttgtggaaatgatgattacatcgctgcgcgataaatcgccacaatttcttcgtgagttgcctggatcgggttagtaaagccacaggcatctttcagggcattagccgccagaaccgcgaaatcttcttctttcacgttcaggtcgcgtaggcctgccgggatatccactttcttcgccagttcacggatggcgttaatgcaggcttcagcaccttccgcgtcgtttttacctgtcacgttcacgcccattgcagcggcacagtcacgcagacgtgcagcggcgactttgctgttgaatacctgaacatgcggcagcagaacggcgttacatacaccgtgtggcaggttgtagaaaccgcccagctggtgcgccatcgcatgaacataacccagagaagcattattgaacgccataccggcgaggaactgggcataagccattgcttcacgcgctttcgcattactgccatcttcaacggctaacggcaggttttcggcaatcatggtcacggctttcagtgcacaagcgtcagtgatcggcgtggcggcaatagaaacatacgcttcgatagcgtgcgttaaggcatccatacccgttgcggcggtcagtgacttcggcataccaatcatcagagaggagtcattgacagaaagcagcggagtgacatgtttatcaacaatcgccattttgatatgacgcgcttcgtcagtgatgatgcagaaacgggtcatttcagaggccgtacccgccgtggtattgatggcgatcatcggcagctgcggttttgcagagcggtcaacgccttcgtaatcgcgaatatcgccgccattggctgccaccagcgcaataccttttgcgcagtcgtgtggagaaccaccgcctaaggagatcacgctatcgcaattattctctttaagtaatttcaaacctgcggcgacgttttccgtggtggggttaggttgggtgccatcataaataacgctaaaaatattgcgttcttccagtgctttttgcacatcgcccgccatacctaatttcgttaacatactgtcagtgacaattaaggtacgggtaaatccataatctgccatcatattcattgcatcagtcaatgaatcagcgccgatgacattcacagaaggaataaagaaagttgaagatgccataacacactcctgaaagtgtaaaaaagggtgggcagcttactgaggattttcattcgaaaacatgatcattattattaattatcnaaattaatctaataaaaagcacattgtattcattaaacaatgtgcttttttaaaatcataagaaatttgtattaa

SEQ ID NO: 1554 - DNA, 33 bp, Escherichia coli
  Strain O55:H7
  modified_base (3)..(4): a, c, g or t
  modified_base (31)..(31): a, c, g or t
aanntaattaatcatttccttatttttccgnaa

SEQ ID NO: 1555 - DNA, 4250 bp, Escherichia coli
  Strain O55:H7
  modified_base (2203)..(2203): a, c, g or t
  modified_base (2777)..(2780): a, c, g or t
tgatcatttccacgacgacgcgtaaagccaatgcggtcaaaatattccagaatctgaattgccagctttcggcctacgcctaagcgatcgcggaaatccgccgcgcaggttgaaccacactcctgatcgagatcgcggatcatattggcaaattcgacaatccgatcgttacggtaataacgatctttgacgatcgcggtaattattccttgctgcgccgcctggcgtagcgtcaggcgcattgcctgctcgtcggtacccgtctcttttgccagatcacgcacccaccacggctcgtcaccaaacagcggctctgctttttgccagatggcctgctgctcttcgctgaagcccgctttgtgatccggcagatgcagccagccgtgatgactgaggatgtcgccgctttcgcgcatcttttcaatcagcaacagtactagcgcttcatcttccattggcaacgccatacgtcgcagacgttcgcgcccaggcccaggttcatcgcgatgttgctcatgataagtcgctaatgtgtcgagaattttccgttgccagcgagcggcaaccggcgcattcaacaagctataaccagcctgaatatagccaggctgttgcagcagttcgcgcatcccttcgccgttgagctggcgcgcccaggcgaaatcaggaagattaaccgcgccgcgttgcaggtgaacggctaacgcttcgctatcattctgtgccctggcgagggaagccaggcattgcagatactctggtttacgtttaccgcgacgcggcgggttaagcatcacgacgcgcgctccggccagcgtgttgcgggcagagatatcgcgcaataccaggcggtcgttatctgccagccataacggggtgtcgaagaccagttcagcaaggttatcttccagcagtgaaacgcgtcccgtgacgtggctggcggcgtggtgaatatgcagcggctgccactgggtcagcggtgtatgggtttgaagctcgacaatcacccgtgtgaacggctctggcggcacatcggcaagcagccagtcgccacggttaatctgctctttttccgcatcacccgcgatgttaagcgcgatacgctgcccggcattggcggtttctgttggctggttttgcgcatgcagcgcacgtacacgcatcggtttatttacaccagtcagccagagtgaatcgcctaccttcacttccccgcttaacgccgtaccggtgacgaccagcccggcaccttttacggtaaatgcgcggtcaatcgcgaggcggaaactatgttggctggcgtgctcgcgttccggcaactgaagcagatgctcgcgcagggcatcaattccccgaccttcggttgctgcggtgataaacagttttgcctcagcaaaaccgtattcccgcagaacctcctttacctggcgttcaacctcatcaacacgcgcttcgtctacgcgatcggctttggtcagcgccactgtcagcatcgggttaccggtcagctgcaaaatcgccagatgctcacgggtctgtgccatcacgccgtcatcgcacgccaccaccaacagcgcgtgatcgataccaccaacgcccgccagcatgttggaaagaaacttttcatgaccgggtacgtcgataaaaccaggcacgcgaccatccggctgcggccagtaggcatagccgagatcgatggtcatgccgcgctttttttcttccggcagacggtcagcatttacgccagtaatcgcctgcaataaggttgttttgccgtggtcaacgtgtccggcagtcgcaataatcatttcaacaacatctccaaaaaccgttgctcatcttcaaggcagcgtaaatccagccacaatcgtccgtcataaatacgaccaatcaccggcactggcaattcacgccagcgggcggctaatgactcaaggtggctaccgcgtccatcatggggtgtaaacgttaatgccgcgctcggcaggcgatcaaccggcagcgaaccactgccaatctgcgaaagacatggcataacctgtaccgcaaactccgcgccgtaatgtgcggcaaggggagcctgtaaacgttgtgcctggatttgaatgacctctgcgctgcgggtaagcaggcgcagggtcggtaatttttcactcagagcttcagggtgtaaataaagacgcaacgtggcttccagcgccgngagggtcattttatccgcgcgtaatgcacgcttcagcgggtggctttgcaggcgggcgatcatctcttttttaccaacgataatccctgcctgcggcccgcctaacaacttgtcgccggagaagctcaccagactgacgcccgccgcaatcaactcctgcggcattggctctttcggcaaaccgtactggctaagatcgaccagcgagccactgcctaaatcagtcactacgggaacatccagctctttgccgagcgccaccagttccgcttcatctatcgctttggtgaacccctgaatgctgtagttactggtatgtactttcatcaacagtgcggtattttcattcaccgcctgacgataatcattcgcgtgcgtgcggttggtggtccctacttcgtgtagggtgcagcctgcctgacgcataacatcgggaatacgaaacgcgccgccaatctccaccagttcgccgcgagataccaccacctcttttccgctggcagtggccgccaacatcaataacaccgccgccgcattgttattgacgatacaggcatcttccgcccccgtaatnnnncacagcagctgcgccagcgcccgatcgcgatgtccgcgtccggcgtcgtccagatcgtactcgagggtcactggcgaacgcatagcctgcgcaacggcttccaccgcggcttccgcctgtaaagctcgcccaaggttggtatgcagcacggttcccgtcaggttgatcaccggacgcagcgcgctctgcgcttctttcgtcaaccgggcatcgacttcttgcgcccagttttcacaccacgcaggcagcgtctggctgccacgaatcacttctcgcgcttcgtcgagcatctgacgcaacaattccaccacgcgggtgtgaccataagtatcacgcaaagaaaggaaggagctatcgcgcaataagcgatcaatagccggaagttgactatagagggaacgcgtttcggttgtcataggaaacctggctgatcaaggccctctcacacggagaagggcgtttaacataaccacggattgtaacgtgagatgggtcaggaggacatatcgcgcatcaagcctttggcggttcggtgcgagcaaaactttcgcggctaaacaggttttcgaccagtttgactaagtgtgggcggtcgacacaccaacctggcgcaacgcggcggaaattgagatatccgacggcacaggcaatggcgatagtcgccagattgaccgtatcggttttgagtgtgccatcgaccagatatccttccagcacatccagactgcggttgattttctcccgctggcgtaacaattcatcttcagactgctgcgccgctggacgcgcctgttcacgcaccgataccagcccggcatccataatgccatccgccagtgcctcaattttgcgcacccgcaacgactccagcggatcgcgcggcaacatcgccggagcgacattcattaattcaatatattcagcgatgatcggcgaatcaaaccagcattcgccctcttcggtcaccagcaccggcacttttcctaacgggttaaattgcgtcacgccgttgtccgcgttatagggcagttcattaataaattcgaaagttatgcccttttctaacaacagaatagaaagtttgcgtacaaacgggctggtgtagctaccgacgagtttcatgccgagtcctttgtgcgaggaaaaatatcagtatggcctggtgatgggaaaaagggcagaaaatgttgatggtttgttacttccaaataaatcacatatttatcatggtgatataaatattttcctaattgtttctatctgatggatatctcacttaaggctttcttataaatctgtagggttttgcctggaagcagacaaataacccgataaaacaaggatgagcagatgagcggaaaaccggcagcgcgtcagggcgacatgacgcagtatggcggtagcattgttcagggttcagccggggtgcgcattggtgcccccaccggcgtggcctgttcggtgtgcccc

SEQ ID NO: 1556 - DNA, 95 bp, Escherichia coli
  Strain O55:H7
  modified_base (83)..(86): a, c, g or t
  modified_base (88)..(88): a, c, g or t
ccggccatccggtcaatccgctgctgggtgcaaaggtccttcccggtgaaaccgacatcgccctgcccgccccgctgccgttnnnncnctcccgc

SEQ ID NO: 1557 - DNA, 548 bp, Escherichia coli
  Strain O55:H7
  modified_base (28)..(31): a, c, g or t
  modified_base (34)..(34): a, c, g or t
  modified_base (457)..(460): a, c, g or t
  modified_base (547)..(547): a, c, g or t
agcagttaccggacaaaaacgcccgcgnnnntgnggagcctcggccccggctggaaaatgcctgcggatatccgcttacagctgcgcgataacacactgatactcagtgataacggcggcagaagcctgtattttgagcacctgtttcccggtgaggacggttacagccgcagcgagtcactctggctggtgcgcggcggcgtggcgaaactggatgaaggtcaccggctggccgcactctggcaggcgctgccggaagaactccgcttaagtccgcatcgttatctggcgacaaacagtccgcaggggccgtggtggctgctcggctggtgtgagcgggtgccggaagcggatgaggtgctgcctgcgccgctgccgccgtaccgggtactgaccgggctggtggaccgcttcgggcgcacacagacgttccaccgcgaagccgccggtgaattcnnnngcgaaatcaccggcgtgacggatggtgccgggcgtcacttccggctggtactgaccacgcaggcgcagcgggcagaagaagcccggna

SEQ ID NO: 1558 - DNA, 149 bp, Escherichia coli
  Strain O55:H7
acggaaccgtccgcttttcctgataccctgtcgggttacaccgaatatggccgggacaacggcatccgtctgtctgccgtgtggctgacgcacgacccggaatacccggagaatttacctgccgcgccgctggtgcgctatggctggac

SEQ ID NO: 1559 - DNA, 4027 bp, Escherichia coli
  Strain O55:H7
  modified_base (2159)..(2159): a, c, g or t
  modified_base (2263)..(2263): a, c, g or t
  modified_base (2381)..(2384): a, c, g or t
  modified_base (2410)..(2410): a, c, g or t
  modified_base (2415)..(2415): a, c, g or t
  modified_base (2427)..(2427): a, c, g or t
  modified_base (2443)..(2443): a, c, g or t
  modified_base (2455)..(2457): a, c, g or t
  modified_base (3361)..(3361): a, c, g or t
  modified_base (3913)..(3913): a, c, g or t
ggcggtggtgtatgaccgtagtggcaaacaggtgcgcagctttacttacgatgataaataccggggccggatggtggcgcaccgtcacacgggccggccggaaatccgttaccgttacgacagcgacgggcgggtgacagaacagctaaacccggcaggcttaagctacacgtatcagtatgagaaagaccgcatcaccatcaccgacagcctgaaccgccgtgaagtcctgcacacgcagggtgaaggcgggctgaagcgggtggtgaaaaaggaacacgcggacggcagcgtcacgcagagtcagtttgacgcggtgggcaggctcagggcacagacggatgccgcaggcaggacaacagaatacagcccggatgtggtgacgggcctcatcacgcgcatcaccacgccggatggcagggcatcggcgttttactataaccaccacagccagttaacgtcagccaccgggcctgacgggctggaaatacgccgggaatatgatgaatggggccgtctgattcaggaaactgcccctgacggcgatatcacccgctaccgttatgataatccacacagtgacttaccctgcgcaacggaagatgccaccggcagccggaaaaccatgacgtggagccgttacggtcagttgctgagcttcaccgactgttccggttatgtaacccgttatgaccatgaccgcttcgggcagatgacggcggtgcaccgcgaggaagggctgagtcagtaccgcgcatacgacagccgtggacagttaattgccgtgaaagacacgcagggccatgaaacgcggtatgaatacaacgccgccggtgacctgaccaccgtcattgccccggacggcagcagaaacgggacacagtacgatgcgtggggaaaagccatctgtaccacgcagggcggtctgacgcgcagtatggaatacgatgctgccggacgggtcatccgcctgaccagtgaaaacggcagccacaccaccttccgttacgatgtactcgaccggctgatacaggaaaccggctttgacggccgcacacagcgttatcaccacggcctgaccggcaaacttatccgcagcgaggatgaggggctggtcacccactggcactatgacgaagcagaccgcctcacgcaccgcaccgtgaagggtgaaaccgcagagcgctggcagtatgacgaacgcggctggctgacagacatcagccatatcagcgaagggcaccgggtgacggtgcattacgggtatgatgagaaaggccggctgaccggtgagcgtcagacggtgcatcacccgcagacggaagcactgctctggcagcatgagaccagacacgcttacaacgcgcaggggctggcgaaccgctgtataccggacagcctgcccgccgtggaatggctgacctatggcagcggctggctggcaggcatgaagctcggcgacacaccgctggtggatttcacccgcgaccgcctgcaccggaaaacgctgcgcagattcggccgttatgaactcaccaccgcttatacccctgccgggcagttacagagccagcacctgaacagcctgcagtatgaccgcgattacacctggaacgacaacggcgaactcatccgcatcagcagcccgcgccagacccggagttacagctacagcgactccggcaggctgaccggcgttcacaccaccgcagcgaatctggatatccgcatcccgtatgccacggacccggcaggtaaccgcctgcccgacccggagctgcacccggacagcaccctcagcatgtggccggataaccgtatcgcccgtgacgcgcactatctttaccggtatgaccgtcacggcagactgacagagaaaaccgacctcatcccggaaggggttatccgcacggatgatgagcgcacccaccggtaccattacgacagtcagcaccggctggtgcactacacgcggacacaatatgcagagccgctggtcgaaagccgctatctttacgacccgctgggccgcagggtggcaaaacgggtgtggcgacgtgaacgggacctgacgggctggatgtcgctgtcacggaaaccgcaagtgacctggtacggctgggacggcgaccggctgaccacgatacagaacgacaggngccgcatccagacgatttatcagccggggagcttcacgccactcatcagggttgaaaccgccaccggtgagctggcgaaaacgcagcgccgcagcctggcggangcgcttcagcagtccggcggcgaagacggtggcagtgtggtgttcccgccggtgctggtgcagatgctcgaccggctggaaagtgaaatcctggctgaccgggtgagtgaggaaagcnnnngctggctggcatcgtgcggcctgacngtggngcagatgcaaanccagatggacccggtntacacgccggcnnnaaaaatccacctgtaccactgcgaccatcgcggcctgccgctggcgcttatcagtgcggaaggggcaacagaatggtgcgcagaatacgatgaatggggcaacctgctgaatgaagagaacccgcatcagctgcagcagcttatccgcctgccggggcagcagtatgatgaggagtccggcctgtattacaaccgccaccgctattatgacccgctgcaggggcgatatatcactcaggatccgattggactgaaggggggatggaatttttatcagtatccgttgaatccggttcagtatatagaccctttgggattagatctattatcattaccttctcccagacaaaaacctgtaagtcaatcctgtactattgatcctataactcaacaacctgttggtaggtttataggtgattctaaaggcaatattatggttgaaccggtaggtggcagaacaatcccgtatccccccagtaatccaggaagtgcagatactcacactctttatcagaataattcaaatgcttataggcttaatccaatagggcatgcaaacaattcaacaccacatgcacatgcacatttaccaggaacaggtagcggtatgaaaggccaaggtccatcccttgatgttaatggtcgcgttgtaccatggaatagtagtgccgcacatatcggtattagatcactcggtacactaagcttttttagttctgttttacatatgtttacacttagatcatgtaaagagggaacgtttggacaatgttattgtgctatgtatgttgaaatgtcaacgggaagcaatcaagatgaggctgatataatgtgcggaatgcctgagtatttttagaatagggggggaatatgtttgatagaatatatcttggtgatcgagcantaaaaaaaattgaatttgatttatggagtaaacaaattagaattcaggttaatttaatctcaaggatagcctatggtacaacagaatggaatttttatgataatgaagacttagaagatggttatttggtattttcagatgttagtttcttcaatataactcctaatggctctattccagatgattatataatttcaataattacagataatgtcaatgttgaatattttgaatcaactatagttgcagttggacaaattccaaatacaaattctggagacattgataatattggtgagtgtcaaattttcatcaggtataaacacagctggattgagaataaattcaaagaaaaaataattcaataaccatgttatgtatagacattttagatggaacgaaccagaggaaggcatgcctccgacttgggttatatgggcacggagttttagtgtagtgaactcaacgacgcaaaccgaataacctgccgctggcgcttatcagtgcggaaggggcaacagaatggtgcgcagaatacgatgagtggggcancctgctgaatgaagagaacccacatcagctgcagcagcttatccgcctgccgggtcagcagtatgatgaggagtccggcctgtattacaaccgccaccgctattatgacccgct

SEQ ID NO: 1560 - DNA, 12628 bp, Escherichia coli
  Strain O55:H7
  modified_base (1938)..(1940): a, c, g or t
  modified_base (5648)..(5648): a, c, g or t
  modified_base (5975)..(5975): a, c, g or t
  modified_base (9169)..(9169): a, c, g or t
  modified_base (12491)..(12491): a, c, g or t
gcggtatatcactcaggatccgattggactgaaggggggatggaatttttatcagtatccgttgaatccggtcataaatgtagatccgcaaggtttggttgatataaatttataccccgaaagtgatcttatccattctgtagctgatgagattaatatcccaggcgttttcacaatcggggggcatggtacccccacatctattgaatccgcaacgcgcagtatcatgacagctaaagatctagcatatctaattaaatttgatgggaattataaagatgggatgacagtttggttattttcttgtaatacaggtaaaggacaaaattcatttgctagccaattagctaaagagttacatacaaatgtaataggacctgacacgctatggacgtggtgggggcgaggaactaatggtaagttaaaaatggatacagtgctaacagcaccaacgaaccttaattcaaataaggatctaatggctataacaacaaaagaccttggtaattggataacatatgggccatctgggcaccccatttctaatatgcaaggtacgccagaaaaacccagtgatataagataggttgtagatgtatgaaagcatgcttgttactatttttttatttctcttttatttgtcaattgcatggtgctgatgtgaaaataaaacaaaacgaaagtatgatggggtctacagcaatgacctatgatttaagtgaagaaaagttgatgaaactgaagtataaatcacaacatggtgattcagaggcatcatttcgactatatcaatattactgctttactaaaaataacatttacaaacaattgcgatacttagaaaaatcagcatctcaggggaatgttacagcgcagtttaattatggggtctttttatcagatacaaatccaacattatcagaatattataatttgaatagagctatttattggatggaattcgctgtaaataacggtaatattgatgcaaagagcaaacttcaagagctcaaaaagctaaagcgaatggatagaaggaagaataaggagaatccgtaaaagcaatagttcatcagactgccgcagcagtagtatgatgatgaatcagggctgtactataactattatcggtaacattaaccgcagcaggggcggtataacactcaggctccgattgggctggaaggtaggtggaatttttatcagtatccgttgaacccgatttctggaatcgatccccttgggattagccacctgtttatacagcataactttaggtatgctttcgtgtgtttcagatataccatgtgatgataatttttatgatgtgcttagtattccagtcgcttctggtaataatatgcaatgtaaaaataatccccgttgtacacatttataaatagatggccaatacctcaaggcctatggagttggaatgttaatgacccgggagcaagcaatagaaaacctgacggcatacgattagtaccgtcagttaatacaggaacttataatcgcaatggattttcaatacatagttgtttaaacgcttttggtccgtctttaggacctcgattctgttccgagggttgtataactggtttatctaatgacatgcaaaaattaaatgagttaatattttcagagccagatagcacattaacagttacggactaaaaaatatggcaaggttattaacaattgtatttttttctctatttctgcgagtgcagttactgcaagacaatttcagagagagttagatttggcagacaaagcaatattatgggcactaatatcagccagtactaaagagggacgaaaagcgtgttcactaagctattttgcctgtaaggccgcagaggctgaactcggactggcatatatggctgcgaatgataacaaggaatttctcacatccttatctaatataatgannnacaaaatagatgctggactttccgaatcctatacatgctatttattaagtaagggaaagatcataagaccatatctgaaaaatctaaatccactccaacttgccgctgattgcattgaaacagtaaataaaataaaagataagaataaaaaaatcattgatataaattcagttaatatttgcagtgatgataaaaatataaaattgagagttaatagtactattatggccattgatgattctataaaatgcatcgataaatgataacttaattttatttaaaaatatattaataactcactctccaggagttttttaacttagttttataatgaatacgataattaaaagtgaagaagaaaatagttgtatacatatattccatgaccctacattgtgatctatagattaaatattttttaaatgtgactgtcatccttcagataataaagccatcatcgcaatagatggaaaagcactcctgctcttttttgattagagccgtcgcaggaggaacaactcatatcatcattgcgatctcgacgatgtatagtctcatcctgcggcagaacaagacggataaaaaatccaatgagagcacactcatccagaacttattaacataatgaatattaaagaaaaatcatcgcagctaatgaagtaatatgcaaaaataattagtccttacaaggagcaaagttccataatctcccccctccccctcaatgatccaaataaagataatgcatccagctggtcattcttagcagcactttccgcatcaccgaaacatggctgaaatggtcggagtaaaccgccacctgggcgtagatgccgtcgggtaaggcatcgatatcatcgttagggtccagttcaatggttcccagcacaccgtccgtgccgggcacgaccgttaatgattgcaataccccctgcgcctgataagaaccgcctggcacgacaggtaaaatactagtcagtttgccgtgaaacacctgcccaggtagcgcgttaaacaccacttccgcatcatcgccgggtttcagacgtaacagcgagttttgccgaaattgggcgacaatttgccgtttttgctcggggatgaagaccatcaccggacgcagcggcaaggcagctgcgtatgtacctgggcggatcagtacctgagtaacgtagccattgctcggcgcgcgaatgacagtctgctcaaggttatattttgcttcagtaagttgcgctcttaagctcacaatctgcgattgctcgccgttaaccatactgtcgagctggctctggatctgcgcctgctccgccaccgagcctttcaccagcgcatcctgcgcgaggaaattttgccgcgcatcgtcgatgtcacgttccgagaacggattcaccgccgcctggctgcctttcaagtaacgttgataatttttaaacagacggtcgcgctccgctgaaacctgggtggtgttggcctgcgcttcagtgagctgcgcacgcagcgtctttatattatgcgtcgccgtcatcaggtcagcctgaagtctgtcaactcgcgcctggtaacgaaccgggtcgagcttaaaaagcacctcgcccttttgaataagctgattattcttgtcagtgacttcagtaacaattcccgtcacctgtggcgtgatagggatcgctatcactgccttttgcgcggtaaaagtgtaagggtggttgtagttcatcaataaaatcaaaccactcaccagaaacacgcctcccagcgccgccgtcgccagcgtccactgatttaccggaatgcggaagattttaaagaccgcccacgccagcgccacgtaagttaaaacaatcaatagatccataattagatctccgggaacgtggaatagtcagtctttttctcggcggcgagttgatgctccagccgggaaattcggtcagaaagtgaggcgatttccgggtcagtcgctttctcctgcgacgcaacatgtgactgcataccccagccacgctccggttgatagagcgtcgcccagatccacagaaacggccagataacatgcagagtaaacaggctcacccagcccgccgtatgaatagcgtcggcatgggggtgattgcgctttttggcaatcagataagggatgtcatgtatcgcgatgattccataaaaaatcaccagaaagacgaagatcagcactcccaacgcgaaatagtttagaaacatatctgcctcggattcacgtttatcagtgttgtttttgggctggcagccagaagggagtcaggctgatattttgacaataatccgggttcgcgattctcgccataacaccaaagaataatttttagaggtgatgagttgcttagttacataacgattgtatgacgaaggcataacatgctgtagatcacatcaggtgaacgccgtaagaaaatatcttgtgattcagatcacaaagattcaacaaaccatcaaaacaaaaatgtgacactactcacatttaaatgccatttttagcgaaaatcgccgccttgttgcttttttacacaagcgttttgtgatgaacgtcacgtcaattacctctctaccccctatatttatgtgattgatatcacacaaaaggccgtcgactggacagttaaccgattcagtgccagatttcgcagtatctacaaggtccggctacctctgccgccacattaacaaaaaacctcgggcttccagcctgcgcgacagcaaacataagaaggggtgtttttatgtcatccgatattaagatcaaagtgcaaagctttggtcgtttcctcagcaacatggtgatgccaaatatcggcgcgtttatcgcgtggggtatcatcaccgcgttatttattccaacagggtggttaccgaacgagacgctggcgaagctggtcgggccgatgatcacttatctcctgccgctgctgatcggttataccggtggtaagctggtaggcggcgaacgtggcggcgtagtcggtgccatcaccaccatgggcgttatcgtcggcgcagacatgccgatgttcctcggttctatgattgcaggtccgctgggcggctggtgcattaagcacttcgaccgctgggtagacggtaagatcaaatccggttttgagatgctggtgaataacttctccgcaggcatcatcgggatgatcctcgctattctggcattcctcggcattggcccgattgttgaaaccctgtccaaaatgctggctgcgggcgttaacttcatggttgtccatgacatgctgccgctggcgtctatctttgttgaaccggcgaaaatcctgttcctcaacaacgccattaaccacggtatcttctcgccgctgggtattcagcagtcccatgaactgggtaaatcaatcttcttcctgattgaagctaacccaggtccaggtatgggcgtgctgctggcgtacatgttctttggtcgtggtagcgctaaacagtctgcgggcggtgcggcaatcatccacttcctgggtggtatccacgaaatctacttcccgtatgtgctgatgaatccgcgtctgatcctcgcagtcatcctcggcggtatgactggcgtgttcacgctgactatcctgggcggtggtctggtttctccggcatctccgggttctatccttgctgtactggcgatgacaccaaaaggtgcttatttcgctaacatcncgggtgtgtgtgcggcgatggctgtctccttcgttgtctctgctattttgctgaaaaccagcaaagtgaaagaagaagatgatattgaagcagcaactcgtcgtatgcaggacatgaaagctgagtctaaaggtgcatctccgctgtctgcgggcgatgtgactaacgacctgagccacgtacgtaaaatcatcgttgcctgtgacgccggtatgggttccagtgcgatgggcgcaggcgtgctgcgtaagaaaattcaggatgcaggtctgtcacagatttcggtcactaacagcgcgatcaacaacctgccgccagatgtggacntcgtcatcactcaccgtgacctgaccgaacgcgctatgcgccaggttcctcaggcacagcatatttcgctaaccaacttcctcgacagcggcctgtacaccagcctgactgaacgtctggttgctgcccagcgacatactgaaaacgaagtgaaagtgaaagacagtctgaaagacagctttgacgattccagtgctaacctgttcaaactgggcgcggagaacatcttcctcggtcgcaaagcagcaaccaaagaagaagcgattcgttttgctggcgagcagctggtgaaaggcggttacgttgagccggagtacgttcaggcgatgctggatcgtgaaaaactgaccccgacttatctgggtgagtctatcgcggtgccacacggtacggttgaagcgaaagatcgcgtactgaaaacgggcgtggtgttctgccagtacccggaaggcgtgcgcttcggtgaagaagaagatgacattgctcgtctggtgattggtattgctgcccgtaacaacgagcacattcaggttatcaccagcctgaccaacgcactggatgatgagtccgtcatcgagcgtctggcacacaccaccagcgtggatgaagtgctggaactgctggcaggtcgtaagtaatccaatcctaccctctcctcacggagagggtttgggtgagggaaaagcctcaccccagccctctcgggtaaaaacattgatgaaggttaatactatgaaagcattacattttggcgcaggtaatatcggtcgtggctttatcggtaaactgctggcagacgcgggtatccaactgacgtttgccgatgtcaatcaggtggtacttgatgccctgaatgcccgtcatagctatcaggttcatgtggtcggtgaaaccgagcaggtagataccgtttccggcgtcgatgctgtcagcagcattggtgatgatgtcgttgatctgattgctcaggtcgatttagtcactaccgccgttggcccggttgtgctggaacgtattgctccggctatcgccaaagggctggtgaaacgtaaagaacaaggtaatgaatccccgctgaacatcatcgcctgtgaaaacatggtacgcggtaccacgcagctgaaaggtcatgtgatgaacgccctaccagaagacgccaaagcgtgggtagaagaacacgttggctttgtcgattccgccgttgaccgcatcgtaccgccttcggcttcggcaactaacgatccgctggaagtgacggtagaaactttcagcgaatggattgtcgataaaacgcagttcaaaggcgcactgccgaacatcccaggcatggagttaaccgacaacctgatggcatttgtcgaacgtaaactcttcaccctgaacacgggtcatgctataaccgcgtacctcggaaaactggccggtcatcagaccattcgtgacgctattctcgacgagaaaatccgcgcggtggtaaaaggtgcgatggaagaaagtggtgcggtactgatcaagcgctacggctttgacgcagacaaacatgcggcgtacatccagaaaatcctcggtcgttttgagaacccgtatctgaaagatgatgtagagcgcgtaggccgtcagccgctgcgtaaactgagtgctggcgaccgtctgatcaagccattgctcggtacgctggaatacagccttccgcacaagaatctgattcaggggattgctggtgcaatgcacttccgcagtgaagacgatccgcaggctcaggaactggcagcactgatcgctgacaaaggtccgcaggcggcgctggcacagatttccgatcttgatgccaacagcgaggttgtatccgaggcggtaaccgcttataaagcaatgcaataatggtggaccaggcgcaggacaccctgcgcccgaataacagattgtcagatatgcaggcaacaatggaacaaacccaggcctttgaaaaccgtgtgcttgagcgtctgaatgctggcaaaaccgtgcgaagctttctgatcaccgccgtcgagcttttgaccgaggcggtaaatcttctggtgcttcaggtattccgcaaagacgattacgcggtgaagtatgctgtagaaccgttactcgacggcgacggtccgctgggcgatctttctgtgcgtttaaaactcatttacgggttgggcgtcattaaccgccaggaatacgaagatgcggagctgctgatggcattgcgtgaagaactaaatcacgacggcaacgagtacgcctttaccgacgacgagatccttggcccctttggggaactgcactgcgtggcggcgttaccaccgccgccacagtttgaaccagcagactccagtttgtatgcaatgcaaattcagcgctatcaacaggctgtgcgatcaacaatggtcctttcactgactgagctgatttccagaatcagcttaaaaaaagcctttcaaaagtaagcaacgtctgcttactgcccctctacctgcttcggccgataaagccgacgataatactccagacgttgtagatataacggcacgctttcatcgggtattccggacggaatcgcgttacggggaggaagttttttcagatactcccggaacgcctggcttgatgccatgaaatctacggctttatcgataagaagcggaacgttttcacctaatttgcccatgatgatatctccgtattaccccgcgccgggaatgcgcggccgccaattttagtttaggttcccggtaaagatgacattaaggaaaacgtgctgaatcctcaataatcatccgctgctgtttattatcttttttctatagatttcttaattaatcaataaattgcgtagtttttaagcatgttaatgattacgttacagaactattgcaatgtcatcagttgtgaacaaagcacctggtcgcgcatactaggggctataaatttatctttatcagaagccatcacatgaaagaagtcgaaaaaaacgaaatcaaacgtctcagcgatcgtctggacgccatccgccaccagcaggccgatctgtcgctggttgaagccgcagacaaatatgccgagctggaaaaagagaaagccacgctggaagcagaaattgctcgcctgcgtgaagttcatagccaaaaactgagtaaagaagcacagaagctgatgaagatgccgtttcagcncgcaattaccaaaaaagagcaggctgatatgggcaagctgaagaaaagtgttcgcggactggtggttgtgcacccaatgaccgcgctgggccgtgaaatgggcctgcaggagatgactggattctctaagactgcgttttaagcgcctcagacgactggttcgatcatatcaacccgcatctggcttgccttagctggtcaatgcggggactctcctgtctactcgcctaattaccaaacaattcactccctttacgtcgatttaccgctggttgatattctgaaaatgcatttttaccgaaatagccacctataaacaataaaaatatatagaagatatcatttattaattaacaagcagttacgtctctttttttcggatttaattgtgaaattttaatcatcatattcatacaataaattatctgtaaattttttcccagacatggtttctttcatatttgacatttattaataatcatcattagaatccacgaaaataatatattcatacaaacacagacatcttttgaaacgaatgatacatttttatgatgaatgcttaaaacaatatttaatcgacacacatcactgtcattaatgtaaagcaacatagatcaccaataatacaatggacaactctaccggcattgatcgctgggcggaggaaataaggatttttacatgaactagaagaagatttttttcagtgctgtcactgtttcagttctctgcgcattaacgggatgtgactacattgaagaaggcaagccagaaagtagtttattgaaacaacaagaagaacataacaataaaattgatctacttgaaaaacaacaagcacagctaaagagtcaactggaaactattcaaaaacaacaaactggcataataagcagtacaaagactttaactcacgtaattaaatccgttaaagatcaacaaaacacttttatttttaccgagtttaacccagcaaaaacgaagtatttcatcctgaacaatggttcggtggctttagcgggtcgagtgttatccattgacgccacagagaatggcagtgttattcatatttcactggtcaacttattaagtacacctatctcaaatattggttttaatgcgacatggggtggtgaaaaacctgtcgatgccaaagagtttgcccggtggcaacaattacttttcaacacatcaatgaaatccacattgaaattattaccaggtcaatggcaagacattaatttgaccctgaagggtgtatcgcccaataacctgggatatctgaagttagccatcaacatggaaaatattcagttcgacaatcttccctctgctgaaaatcggcagaaaagaagcaaaaaataaatgcagttagtacgcttataacaaggaatagcgagcatcattaatgaacaaaatatttaaagttatctggaaccctgcgacagggaattatactgttaccagcgaaacggcaaaaagccgtggcaagaaatctgggcgcagtaagctgttaatttctgcgctggttgcgggtggaatgttgtcgtcgtttggggcattggcgaatgccgggaatgacaacggtcagggtgttgattacggtagtggatcagctggcgacggctgggttgctataggcaaaggggcgaaagcaaatacttttatgaacaccagtggttccagtactgctgtgggttatgacgctatagctgaaggccaatatagctctgccatcgggtcaaaaacccatgcgattggtggtgcatcaatggcctttggggttagtgcaatatcagaaggcgatagaagtatagcactgggtgcctcttcgtattcattgggccaatactcaatggccctcggccgttattcaaaagcattgggtaaattgtctattgctatgggggactcttccaaagcggaaggagcaaacgccattgccctgggaaatgccactaaagctactgagattatgagtattgctcttggcgacaccgccaatgcgtcaaaagcgtattcaatggcgctgggagcaagtagcgtcgcatctgaagaaaacgctattgcgataggtgctgagaccgaagccgctgaaaatgcaactgctattggcaataatgcgaaggcaaaagggactaatagcatggcaatggggttcggaagccttgccgataaagtcaatactatcgcattaggaaatggcagccaggctctggcagataatgcaatcgccataggccagggcaacaaagctgatggcgtggatgccatcgctctgggtaatggtagccagtcgagaggcttaaacaccattgccttaggcacagccagtaatgcaactggtgataagagtcttgcgcttggtagtaatagcagtgccaacggtattaactctgtcgcgctgggcgcagattccattgcggatttagacaataccgtctctgtcggcaatagttcattaaaacgcaagatcgttaatgtgaaaaatggcgcgatcaagtctgacagttacgatgccattaatggttcacagctttatgccattagcgactcggtagcaaaaaggcttggaggaggggctgcagtagatgttgatgacggtactgttacagcaccaacctacaatttaaaaaatggtagcaaaaataacgtaggggctgcgctcgctgtacttgatgaaaacaccctgcaatgggaccaaaccaaaggcaaatacagcgctgctcatggtactagtagcccaactgccagcgtaatcaccgatgttgcggatggcacgatttcagcctccagtaaggatgcggttaacggttcccaactgaaagctaccaatgacgatgtcgaagccaacaccgccaatatcgctactaataccagcaacattgccacgaatacggcaaatattgccaccaataccaccaatatcaccaacctgacggattccgttggtgaccttcaggctgatgccctgctctggaacgaaactaaaaaggcattcagtgcagctcacggccaggataccaccagcaaaatcaccaacgttaaagatgccgacctgacggctgacagcactgatgctgttaacggctctcagctgaaaaccaccaacgatgctgtggcgacgaataccaccaatatcgccaataacacttccaatattgccactaacaccaccaacatctctaacctgactgagacggtgactaatcttggtgaggatgcgctgaaatgggataaggacaatggtgtattcacggcagctcatggcaccgagaccaccagcaaaatcaccaacgttaaagatggcgacctgacnactggcagcaccgatgccgttaacggctctcagctgaaaaccaccaacgatgccgtggcgacgaataccaccaatatcgccactaacaccaccaacatctctaatctgactgagacggtgactaatcttggtgagga

SEQ ID NO: 1561 - DNA, 1784 bp, Escherichia coli
  Strain O55:H7
tgaaatgggataaggacaatggtgtcttcactgcagctcatggcaacaataccgccagcaaaatcaccaatatcctggacggcacagtcactgcaaccagttccgatgccattaacggtagccagctttatgacttaagcagcaatatcgccacctacttcggcggcaatgcttctgtgaatactgacggtgtgtttaccggtccaacctacaaaatcggtgaaacaaattattataacgtcggcgatgcactggctgcgattaactcctcatttagcacgtctctcggcgatgctctgctttgggatgccaccgcaggtaaattcagtgccaaacacggtactaatggtgacgcaagcgtgatcactgatgtcgcagatggtgaaatttcagactccagttctgacgcagtaaacggctcacaactccacggcgtgagcagttatgttgttgatgcgctggggggtggtgccgaagtcaatgcagacggcaccatcactgcgccgacgtacaccattgctaatgctgattacgataatgtcggtgatgccctgaatgctatcgataccactcttgacgacgctctgctctgggatgcggacgccggtgaaaatggtgcatttagcgccgctcacggaaaagataaaactgccagtgtaatcactaacgtcgctaacggtgcaatctctgctgccagcagcgacgcgattaacggctcacaactctataccaccaataagtacatcgctgatgcgctgggtggtgacgcagaagtcaacgctgacggcaccatcaccgcaccgacttacaccattgcgaacgccgagtacaacaacgtcggtgacgccctggatgcgcttgatgataacgccctgctgtgggatgagactgccaatggcggtgctggagcctacaatgccagccatgacggtaaagccagcatcatcactaatgtcgctaatggcagtattagtgaggacagtaccgatgcagtgaacggttctcagttgaatgcgacgaatatgatgattgagcagaacacccaaattatcaatcagctcgctggtaacaccgacgcaacctatatccaagaaaacggtgcgggtattaactatgtgcgtactaacgacgacggcttagcgttcaacgacgccagcgcacagggtgttggcgctacagctataggttataactctgtcgccaaaggcgatagcagcgtagctattggtcagggcagctacagcgacgttgatacgggtatcgccctgggtagcagctctgtttccagccgagtgattgccaaaggctcccgtgacaccagcataacggaaaatggcgttgttattggttacgacaccacggatggcgaactgctcggtgcattgtctatcggtgatgacggtaaatatcgtcaaatcatcaacgtagccgatggttccgaagcccatgacgccgttacggttcgtcaattgcagaatgcgattggtgcggtcgcaaccacgccgactaaatacttccacgctaattcaacggaagaagattcactggcagtgggaactgactcgctggcaatgggtgcgaaaaccatcgtgaatggcgataaaggtattggtatcggttatggtgcctacgtggacgcgaatgcacttaacggcattgccattggtagcaatgcgcaagtcattcatgtcaacagtattgcgataggtaatggttctacgaccactcgtggcgctcaaaccaattataccgcctacaacatggacgcaccgcagaactctgtc

SEQ ID NO: 1562 - DNA, 12931 bp, Escherichia coli
  Strain O55:H7
  modified_base (1059)..(1059): a, c, g or t
  modified_base (1109)..(1109): a, c, g or t
  modified_base (4259)..(4262): a, c, g or t
  modified_base (4938)..(4938): a, c, g or t
  modified_base (6405)..(6405): a, c, g or t
  modified_base (7674)..(7674): a, c, g or t
  modified_base (10807)..(10807): a, c, g or t
ttctcagtcggtagtgcggatggtcaacgtcagatcactaacgtcgcagcaggttcggctgataccgatgcggtcaacgtgggtcagttgaaagtaacggatgcgcaggtttcccagaatacccagagcattactaacctggataatcgggtaacgaatcttgattcacgcgtcaccaatatcgaaaacggtattggcgatatcgtcaccaccggtagcaccaagtacttcaagaccaataccgatggtgtagatgccagcgcgcagggtaaagatagcgtcgcgattggttccggctccattgctgccgctgacaacagcgtcgctctgggtacagggtctgtggcaaccgaagaaaatacgatctctgtaggttcctctactaaccaacgtcgtatcaccaacgtagctgcaggtaaaaatgctaccgatgctgttaacgtggcacagttgaagtcttccgaagctggcggtgtacgttacgacaccaaagctgatggttctatcgactatagcaatatcaccctcggtggcggcaacggcggtacgactcgtatcagcaacgtctccgctggcgtcaacaacaacgacgcggtgaattacgcgcagttgaagcaaagcgtgcaggaaacgaagcaatacaccgatcagcgaatggttgagatggataacaaactgtctaaaactgaaagcaagttgagcggtggtatcgcttctgcaatggcaatgaccggtctgccgcaggcttacactccaggtgccagcatggcctctattggtggcggtacttacaacggtgaatcggcagttgctttaggtgtatcgatggtgagcgccaatggtcgttgggtctacaaattacaaggtagtaccaatagccagggtgaatactccgccgcactcggtgccggtattcagtggtaatgatccattaagttagtgtgactaagggcaaacgccaaattgcctgatgcgttacgcgcatcaggcaagataaggcgctccgggtcaacaatctaagggcaattctctgatgaggattgcccttttctttaccanacatctccccccacaagaattggccctaccaattcttcgcttatctgacntctggttcacaattccccaattaaaactcacatcaatattgccaatacataacatttagttaaccattcattgtcattatccctacacaacacaattggcagtgccacttttacacaacgtgtgacaaggagatgagcaacagactcattacacgatgtgcgtggactccaggagacctgcaatgaatctctggcaacaaaactacgatcccgccgggaatatctggctttccagtttgatagcatcgcttcccatcctgtttttcttctttgcgctgattaagctcaaactgaaaggatacgtcgccgcctcatggacggtagcaatcgcccttgccgtggctttgctgttctataaaatgccggtcgctaacgcgctggcctcggtggtttatggcttcttctatggtttgtggcccatcgcgtggatcattattgcagcagtgttcgtctataagatctcggtgaaaaccgggcagtttgacatcattcgctcgtctattctttcgataacccctgaccagcgtctgcaaatgctgatcgtcggtttctgtttcggcgctttccttgaaggagccgcaggctttggcgcaccggtagcaattaccgccgcattgctggtcggcctgggttttaaaccgctgtacgccgccggactgtgcctgattgttaacaccgcgccagtggcatttggcgcgatgggcattccaatcctggttgccggacaagtaacaggcatcgacagctttgagattggccagatggtggggcggcagctaccgtttatgaccattatcgtgctgttctggatcatggcgattatggacggctggcgcggtatcaaggagacgtggcctgcggtcgtggttgcgggcggctcgtttgccatcgctcagtaccttagctctaacttcattgggccggagctgccggacattatctcttcgctggtatcactgctctgcctgacgctgttcctcaaacgctggcagccagtgcgcgtattccgttttggtgatttgggggcgtcacaggttgatatgacgctagcccacaccggttacactgcgggtcaggtgttacgtgcctggacaccgttcctgttcctgacagctaccgtaacactgtggagtatcccgccgtttaaagccctgttcgcatcgggtggcgcgctgtatgagtgggtgatcaacattccggtgccgtacctcgataaactggttgcccgtatgccgccagtggtcagcgaggctacagcctatgccgccgtgtttaagtttgactggttctctgccaccggcaccgccattctgtttgctgcactgctctcgattgtctggctgaagatgaaaccgtctgacgctatcagcaccttcggcagcacgctgaaagaactggctctacccatctactccatcggcatggtgctggcgttcgcctttatctcgaactattccggactgtcatcaacactggcactggcactggcgcacaccggtcatgcattcaccttcttctcgccgttcctcggctggctgggggtattcctgaccgggtcggatacctcatctaacgccctgttcgccgcgctgcaagccaccgcagcacaacaaattggcgtctctgatctgttgctggttgccgccaataccaccggtggcgtcaccggtaagatgatctccccgcaatctatcgctatcgcctgtgcggcggtaggcctggtgggcaaagagtctgatttgttccgctttactgtcaaacacagcctgatcttcacctgtatggtgggcgtgatcaccacgcttcaggcttatgtcttaacgtggatgattccttaatgattgttttacccagacgcctgtcagacgaggttgccgatcgtgtgcgggcgctgattgatgaaaaaaacctggaagcgggcatgaagttgcccgctgagcgccaactggcgatgcaactcggcgtatcacgtaattcactacgcgaggcgctggcaaaactggtgagcgaaggcgtgctgctcagtcgacgcggcggcgggacgtttattcgctggcgtcatgacacatggtcggagcaaaacatcgtccagccgctaaaaacgctgatggccgatgatccggattacagtttcgatattctggaagcccgctacgccattgaagccagcaccgcatggcatgcggcaatgcgcgccacacctggcgacaaagaaaagattcagctttgctttgaagcaacgctaagtgaagacccggatatcgcctcacaagcggacgttcgttttcatctggcgattgccgaagcctcacataacatcgtgctgctgcaaaccatgcgcggtttcttcgatgtcctgcaatcctcagtgaagcatagccgtcagcggatgtatctggtgccaccggttttttcacaactgaccgaacaacatcaggctgtcattgacgccatttttgctggtgatgccgacggggcgcgtaaagcaatgatggcgcaccttagttttgttcacaccaccatgaaacgattcgatgaagatcaggctcgccacgcacggattacccgcctgcccggtgagcataatgagcattcgagggagaaaaacgcatgattatttccgcagccagcgattatcgcgccgcagcgcaacgcattctgccgccgttcctgttccactatatggatggtggtgcatattctgaatacacgctgcgccgcaacgtggaagatttgtcagaagtggcactgcgccagcgtattctgaaaaacatgtctgacttaagcctggaaacgacgctgtttaatgagaaattgtcgatgccggtagcactggcaccggtgggtttgtgtggcatgtatgcgcgtcgtggcgaacttcaggcagccaaagcggcggacgcgcatggcattccgtttactctctcaacggtttccgtttgcccgattgaagaagtcgcgccagccatcaagcgcccaatgtggttccagctttatgtactgcgcgatcgcggctttatgcgtaacgcgctggagcgagcaaaagcagcgggttgttcgacgctggttttcaccgtggatatgccgacaccgggagcgcgttatcgtgatgcgcattctgggatgagcggcccaaatgcggcaatgcgnnnntacttgcaagcggtgacgcatccgcaatgggcgtgggatgtgggcctgaacggtcgtccgcatgatttaggtaatatttcggcttacctcggcaaaccgaccggactggaagattacatcggctggctggggaataacttcgatccgtccatctcatggaaagaccttgagtggatccgcgatttctgggatggcccgatggtgatcaaagggatcctcgatccggaagatgcgcgcgatgcagtacgttttggtgctgatgggattgtagtttctaaccacggtggccgccagctggacggtgtactctcttccgctcgtgcgttgcccgctattgcagatgcggtgaaaggtgatatcgccattctggcggatagcggaattcgtaacgggcttgatgtcgtgcgtatgattgcgctcggtgccgacaccgtactgctgggtcgtgctttcctgtatgcgctggcaacagcgggccaggcgggtgtagctaacctgctaaatctgatcgagaaagagatgaaagtggcaatgacgctgactggcgcgaaatcgatcagtgaaattacgcaagattcgctggtgcaggggctgggtaaagagttgcctacggcactggctccgatggcgaaagggaatgcggcatagtcgtttgagccccctcaccctaaccctntccctcagggagtggggaccgttcggcgctgtatgtactccctcactctgaaacgacaccgcactctttttttctccctcgcccctccggggtgaggggaaaaggccgcactgctcaccaattttctgctatcctgcccccgcactaagggggcagtatgctaaacatcgtactttacgaaccagaaattccgccaaatactggcaatatcatccgtctttgcgctaataccggctttcgtctgcatatcatcgaaccgatgggatttgcctgggacgataagcgcctgcgccgcgcggggctggactatcacgagtttaccgccgttacgcgtcatcatgactttcgcgcgttcctcgaagcagaaaatccccagcgcctgtttgccctcaccacgaaaggtacgcctgctcacagcgccgtaaactatcaggatggcgattatctgatgttcggcccggaaacacgcggcctgccagcgagcattcttgatgccctgcccgctgaacaaaaaattcgcattccgatggtgccggacagccgcagcatgaacctgtccaatgcggtgtcagttgtggtgtatgaagcctggcggcagctgggatatccgggagcgttgttgagagattagttactgtatgccggatagatgattacatcgcatccggcacgatcacaggacattagatcccatccccatactcaaatgtatggttaataccgttgaaatgctggtccatatccattgatggcttatcgctgtctggtttaccgacaatacgagccggaacgccagcggcggttgtatgcggcggcaccggttgcagcaccacggaacctgcgccaatcttcgcgccgcgaccaacttcaatattgccgaggattttcgcgcccgcgccaatcatcacaccttcacgaattttcgggtgacggtcaccaccagatttacccgtaccgccaagcgtcacagattgcagaatcgatacgtcgttttcaattaccgccgtttcacccacaacgatgcccgtggcgtggtcgagcataatgccacggccaatttttgctgccgggtgaatatcgacctggaacgtcacagaaacctggttttgcagaaagattgccaatgcgcgacgcccctgattccacaaccagtgaccgatgcgataggcctgcaaggcatgaaaacccttcaggtataacaacggggttgagtatttatcgactgccgggtcgcgggtacgcaccgcctgaatatcacaggccgcagaggcgatcatttccgggtcagcggcgtaggcttcttccaccacttcacggatagcaatagcaggcataattggcgatgacagcttgttcgccagcatgtagctcagtgcactaccaaggttttcgtgcttgagtagcgtcgcgtggtaaaaactggccagcattggctcacagtccgccagcgttctggcttcggctttnatattgttccagacaatttccagttcttcacacgacattgcttactccacacgatgagataatgaccggcccgttctgcgcgggccgggtcatagcggtaacaaaggttccctggggttagtggctgctgcgctcgtccttgcgtgcacgacctaataacgtcaatgctgcctcgcgcgcgttttttccgcaatataatacttgataaatttcctcggttattggcatttctacgccgaagcgatgcgccagttcgcggacttctttcgtattgcggtagccttccaccacctgaccaatcttctcctgcgcgctttgtacatccatgccctgaccgagcatcatgccaaaacggcggttacgcgactggttgtcggtacaagtaagcacaagatcgcccagccccgccatgcccataaaggtggcaggatcggcacccagcgccgcgccaagacgcgacatttcagccagcccacgggtgatcagtgccgtacgcgcattcgcaccaaaaccgataccgtcggacatccccgcgccaatggcaatgacgtttttcaccgcaccgccaagctgcacgccaatgaaatccggattgctgtaaacgcggaaacttttgccgcagtgcagcagctgctggagatcatcggcaaaggtctgatcggtcgaggccagcgaaatagctgtcggtaaacctgccgccagttctttcgcaaacgttgggccagagataaccgccagcggaatttgatcgcctaaggcctcacgcgccacgtcctgtaacagacgtccggtttccgcttccagccctttggtcgcccacaccagacgcgcatcaggacgcatcagcggtttaatctggcgcagcacttcaccaaagacatggctgggtacgacgacgagaatattacggctggctgccagcgcagtggcgagatcgctttcaagatggagcgtatcgggaaaaggcacatcggggagaaacgcggcgttacagcggtcgcgttcaagcgttgcgatatgttcagggtcatggccccagaggacaacctcgtggccatttcttgccagggtgatggcaagagcggtgccgtacgagccggcaccgatcacagtcattgaagcattacgttggttcatcaggcatcctgatgttcttcagtaccttcgccagcctgctgctgcaaatagttcatgaacagcgcatcgaagttaaccggcgcaaggttcagttgcgggaatgtaccgcgggataccatgctggtgatgcantcacgagcatacgggaacagaatgttcgggcagtatgcgcccaggcaatgtgccatctgggtgccttcgatacccgcgatggagaaaataccgccctgctgaacttcacacaggaacgcggtttcttcgcccagggaggccgttacggtaacacgcagtaccacttcgtatacgtcatctgccagttgggaagatgccgtatccagatcaagtttaacttctggttgccaatctttctggaaaacgtgcggcgcgttcggcgcttcgaaagagatatccttggtataaatacgttggatctggaaagtcatttcagtgttgttttgttctgacatgtgtagaaaacccttaagtgttgtccttaaatactgcgcaatgtaatgccaacgttcacacgttatttcagcaggggatccagtccaccacgtgcatccaatgcatacaagtcatcacagccgccaatgtgctgtgcgtcaataaaaatctggggaaccgtggtgcgaccgctgcgtttgatcatctcttcacgcttggcggcattgccatcgatcggcaactcctgaaaactcacgcccttgctgctcagcagtgcttttgcacgatggcaatacgggcaggtttctttggtatagatttcaacattggccataatttagctcctgtttttttaccctgaaatttcatgttgcagggcggctgcaaaatggagtgtccccagaagcttataacaataagtcgctgggggcctaattgcagctaacggcctgcatcatgaaagacgacaggtaaattatttgccgcgcaccaaaggcaagttttcgccagcccagccagcgacgccttctttcagcacgaatacttgcgcaaaaccagctttcgtcagtgcgtttgcaggctcctggcactgcatgccagaaccgtctaccacgataaccggtttgtctttgtgcttctcaagctcaccaacattgttggctttgatttcgctcggcaacagattgatagaacctgcgatatggcctttacggaagtcatcacgctgacgtaaatccacaaccacagcgtcttctttgttgatcagacgcgtagcttcaccacgagtaatcaccttcactttcgaggtcaggctcttaaacgtagtcacaagaaccgccaccagtaacgcgatccaggcgatactcagtatgggatgacggccaacaaattgcataatttcttgcatggggggtaacaactcccgacgtagtgattaaaaaaaccaggaaaggagtatacctgcgcggtgcggcaaatacagccagcgcgttaactggaatgcaattttgcggggcacgacgaaaaaaaagcgcaaatctggcatcggcttgccgcgagcggtcgtatattttgatcttcagaggctattttatcgattcagctgtagtaaaattacgcaaattttgactcttgagtatgaggttgtcgcaatgtcggtttctaaaaaacctatggtactggtgattctggatggctatggctatcgtgaagaacagcaggataacgccatttttagtgctaaaaccccggtaatggatgcactgtgggccaatcgtccgcataccctgatcgacgcttccggtctggaagtcggtctgcctgaccgtcagatgggtaactccgaagtaggccacgttaacctgggtgccggccgcatcgtgtatcaggacctgactcgtctggacgttgaaatcaaagatcgcgctttctttgctaatccagtgctgactggcgcggtagataaagcgaaaaacgcaggtaaagcagtacacattatgggtctgctctccgcaggcggcgtacacagccacgaagatcacatcatggcgatggtagaactggcagctgaacgcggcgcagaaaaaatctacctgcacgcattccttgacggtcgcgacaccccgccgcgcagtgctgaatcctcgctgaaaaaatttgaagagaaatttgctgcgctgggtaaaggccgcgtagcgtccatcattggtcgttactacgcgatggaccgcgataaccgttgggatcgcgttgaaaaagcctatgacctgctgactctggcgcagggtgagttccaggccgatactgccgttgctggtttgcaggcagcttatgctcgcgacgaaaacgacgagttcgtgaaagcgaccgttattcgtgcagaaggtcagccagatgcggcaatggaagacggcgatgcgctgattttcatgaacttccgtgctgaccgcgcgcgcgaaatcactcgtgcattcgtaaacgcagatttcgacggcttcgcgcgtaagaaagtggttaacgtcgatttcgtgatgctgaccgaatacgccgctgacatcaaaactgcggttgcttacccacccgcttccctggttaacaccttcggcgagtggatggcgaaaaacgacaaaactcagttgcgtatttccgaaaccgaaaaatatgcccacgttactttcttcttcaacggtggcgtagaagagtcgttcaaaggcgaagatcgcattctgatcaactcaccgaaagtggctacctacgatctgcaaccggaaatgagctccgcagagctgaccgaaaaactggttgcggccatcaagagcggcaaatacgacaccattatctgtaactatccgaacggcgacatggtaggtcacaccggggtgatggaagcggcggttaaagcggttgaagcactggatcactgcgtggaagaagtcgcgaaagcggttgagtccgtgggtggacaactgctgatcaccgctgaccacggtaacgctgaacagatgcgcgatccggcaacgggtcaggcacacacggcacacaccaacctgccagttccgctgatttacgttggtgataagaacgtgaaagcggttgcaggcggcaaactttctgacatcgcgccgaccatgttgtcgctgatgggtatggaaatcccgcaagagatgactggtaagccgctgttcatcgtggaataatccctccccatgaggggaaaggcgattaataccatgacacgggccgtgaaaccgcgcaggtttgcaatcaggcccatcatctacgccagcgttcttagcgctggcgtattgttgtgcgcctnttccgcccacgcggatgagcgtgaccaactcaaatctattcaggccgatatcgccgcaaaagagcgcgcggtacgccaaaagcaacaacaacgcgcaagcctgctcgcacaattgaaaaagcaggaagaagcgatctctgaagccacccgtaagctgcgcgaaacgcaaaacacgctcaatcaactcaataaacagattgatgagatgaacgcgtcgattgccaaactggagcagcaaaaagccgcccaggagcgcagcctcgccgcacaactggatgccgcattccgtcagggcgagcataccggtattcagctgattctcagcggtgaagaaagccagcgtggacagcgtttacaggcttatttcggctatctcaaccaggcgcgacaagaaaccattgcccagttgaagcaaacgcgtgaagaagtcgccatgcagcgtgctgaactggaagagaaacagagcgagcaacaaacgctgttatatgagcagcgcgcccaacaggcgaaactgactcaggcgctgaacgagcgtaaaaagacgctggcagggctggagtcttccatccagcaaggtcagcaacagttgagcgagctgcgcgccaacgaatcccgtctgcgtaacagcattgcccgtgcggaagccgcggcgaaagcgcgtgcagaacgagaagcacgtgaggcccaggcggttcgcgaccgccagaaagaagcgacgcgcaaaggcaccacctacaaaccgaccgaaagcgaaaaatcgctgatgtcccgaactggtggcctgggtgcgccgcgtggtcaggcattctggccggttcgcgggccgacgctgcatcgctatggtgaacagctacagggcgaactacgctggaaaggaatggttatcggtgcctctgaaggtactgaagttaaagcgattgccgacggtcgggtgattctggctgactggctgcaaggttacggtctggtggtggtggttgagcacggtaaaggcgacatgagtctttacggctataatcagagcgcactggtgagcgttggttcgcaggttcgcgcgggccagccaattgcactggtgggcagcagtggcggtcagggtcggccttcactctatttcgaaattcgccgccaaggtcaggcggtcaatccacagccgtggttgggaagataagttttgtttccatttcgtcgtaacgttcttgcatttgccgctctgttggcgctctcctcccccgtacttgctggcaaacttgccatcgtcattgatgattttgggtatcgcccgcacaacgaaaaccaggtgctggcgatgccctccgctatctccgtcgctgtattacccgattcaccgcacgccagagagatggcgaccaaagcgcataacagcgggcacgaagtgttgattcatctcccgatggcaccactgagtaaacagccgctggagaaaaatacgctgcgcccggagatgagcagcgacgaaattgagcgcattattcgtagtgcggtcaataacgtgccctatgccgtggggatcaacaaccacatgggtagcaagatgacctctaacctgtttggtatgcagaaagtgatgcaggcactggagcgttacaatctttacttcctcgacagcgtaaccatcggtaatacccaggcgatgcgcgccgcgcaaggtactggcgtgaaggtgatcaaacggaaggtgttcctcgacgattcgcagaacgaagcggacatccgtgtgcaatttaatcgcgcaattgatctggcgcgtcgcaacggttcaaccattgccattgggcatcctcacccttcaacggtacgcgtgctacaacagatggtttataacctgccgccagacattacgctggtgaaagccagcagcttgctgaatgaaccgcaggttgatacttctacaccgccgaaaaacgctgtgcctgatgcaccgcgtaatccgttccgtggcgtgaagctgtgcaaaccgaagaaaccgatagaacctgtttatgctaatcgcttctttgaagtattaagcgaaagcatcagccagagcacgctgatcgtttacttccagcatcagtggcaaggctggggcaaacagcccgaagcggcgaagtttaacgctag

SEQ ID NO: 1563 - DNA, 475 bp, Escherichia coli
  Strain O55:H7
ggcgctacgcgtaatgcgatggtgcgaccgcgtttttttcgcgccattgccataagcggaaagaccacagtaacgcctggtaaccgaccttcacgctgcgcacattggtaatcaggcgcttatacataccggaagtaaatatctcggcaatcatccgttggcgggtaagaatatccggctctttgcgcaccgcatggcaaacacgcaatgcttcgtaagttatttgctgatgaaattccggataaatcataattttgtcggcataatttcgatttaatttctccagcaggcgggtaatcttaatatagtgacgttgataattaaggtttttattcccttgtctatgcaaccgactcactgacgtattatgcagataatatttatataatgattgctcggtatatcgcgcacgcagcgcgttaaacatgaattctgttgtccagacaatatcctgatgatgtaatccggcaataaa

SEQ ID NO: 1564 - DNA, 2238 bp, Escherichia coli
  Strain O55:H7
atttttaacaataacatcacggcgataaacccccatccagacaacgtgagtccaacggcgcgaagaaagccccatccgcagccagtccgggccggttaatacaccggttgagcgaaggcgatcgctggggatggattgccaggtttctcccgtttcacgaaaagaccagtcagcgttgcactgcgccacgtcgaggtcgtcctctaacgccatggtcatcagcgtttcgtacatggtgggatagacctcatcgtcagcatcgacaaaagcgacatatttgcccgtcgccacctcgatcccacgattacgcgctaccgatgcgccagcattcgcctgatgcaacaaacgaacgtgcggatagttttctgcgtaatgctttgctatttcaacagaattatccgttgaaccatcgttaataataatgatttccagagcagtccaggtttgcgtaattaaagattccatacaagtgcggaaatcatcgcccgcattatataacggaataataacactaagtttattggtgctgttcatcataaattaccgacgacctctgaagttatcctgacgttttacaggctttgtattaagaaactattaagcctgtgagatattatttttacaggtgagagagtcacttcagggtagagagataatgagaacagctatataaaagatcagcgcaattacgaactctttattacactgacaggattttacatatttaacagattatcctcaggcaaaagggctggaataccagccctttttcgtgttaatcccagctcagaataactttcccggactggcccgaacacatagcgtcaaagcccttctggaaatcatcgatagagaaacgatgggtaatgatcggcgagagatcgaggccagactgaatcagcgccgccatcttgtaccaggtttcaaacatctcacgaccgtaaatgcctttaatgaacaagcctttaaagatcactttggtccagtcgatagacatgtcagacggtggaatacccagcatcgcaatacgaccgccgtggttcatggtatcgagcatggtacgaaacgctggcggcgcgccggacatttccagaccgacatcaaagccttcggtcatgcccagttcagccatcacatcattaaggttttctttcgcgacgttaaccgcacgggtgatacccattttgcgcgccagctcaaggcggtattcgttaacatcggtgatcaccacattgcgtgcaccaacgtgtttcgccaccgccgcagccataatacctatcggacctgcaccagaaaccagcacatcttcgcccaccagatcgaacgacagcgcggtatgcacggcgttaccgaagggatcaaaaatggaagccaggtcgtcggagatattgtcggggattttgaaagcgttgaacgccggaatcaccagatattcggcgaagcagcccggacggttaacaccgacaccaatggtgttgcggcacagatgggtacgaccgccacgacagttgcgacagtgaccgcaggtgatatggccttcgccagaaacgcgatcgccgattttgaagcctttcacttcctgaccaatacctaccacttcaccgacatattcatggcctacgaccatcggcaccgggatggttttttgcgaccactcatcccagttatagatgtgaacgtcagtcccgcagatggctgttttacggattttaatcagcagatcgttatgcccgagttccggtacaggaacgtcggtcatccagatgccctcttccgctttcagtttggataacgctttcatctcacatcctcaggcgataacgcccagttgtttaccaatacgcgtgaatgcttctactgcacgcgtaatttgctcaggggtatgcgccgcagacatctgggtacgaatacgcgcctgacctttcggaacgaccggatagaagaaaccggtgacgtaaatgccctctttttgcagctcacgggcaaatttctgcgccactactgcatcgccaagcatgaccggaataatggcatgatcggctcccgccagggtaaagcccgccgccgacatttgctcacggaactggcgcgcgttcgcccacagacggtcacgcagttcgctgcccgcttcgaccatctccagtactttgatggacgcggcaacaatggccggtgccagcgagttggagaacaggtacggacgagaacgctggcgcagccactcaaccacctctttgc

SEQ ID NO: 1565 - DNA, 1916 bp, Escherichia coli
  Strain O55:H7
cggtataaccaccagaagccccgcccagcgctttaccaagcgtaccggtgataatatcgacccggcccatcacatcgcagtattcatgggaaccacgaccattttcaccgacaaaaccgaccgcgtgggagtcatccaccatcaccagggcatcgtatttatctgccagatcgcaaacgcctttcaggttggcaatcacgccgtccattgagaacacaccatcggtggcaatcagcacatgacgcgcaccggcttcacgcgcttctttcagacgtgcttccagctcctgcatatcgttgttggcatagcgatagcgtttagctttgcacagacgcacaccatcaataatagacgcgtggttcagtgcgtcggagataatggcgtcttccgcacccagcagcgtttcaaacagtccaccgttagcatcaaagcaggaagagtagagaatcgcatcttccatccccaggaatgccgccagtttttgttcaagctctttatggctgtcctgagtgccgcaaataaaacgcaccgaagccatgccgaaaccgtgagaatccattcccgcctttgctgccgcaatcagatccggatgattcgccagcccgagatagttgttggcacaaaagttaatgacgtggcttccatcagccacagtgatatctgcttgctgcgcagacgtaataatgcgctcttctttaaacaacccttccgcccgtgcggtttccagatcgttggttaactgctgataaaattctccacgcattgcgattctccagacagggcaaattccagcacatattacccaaacttataggtcgcgacgagatgacgcgttaactcttctgcaaaattcaggataaatgacgtgtaacttgatgtctctcaacacctacagatagtagaaaaactgtacagttttggctgggcataatgatgattgattttactgcattgatataaaaagaaaaaatgatgccaaagcatcatttttcctatctcagttggtatcaaaacgctacccactaatggagggaaacctattttcttgaaaggaaaattctcagcgcctgcatttttgcccctaaagtgttactcctgaagcagcgaaacaaatcgaaccattttcctctccccagatagtttaggttgaagagatcggggcgtttgtaatagcacatgacaaaaatgccctggtcatcatccacaatgttattatttagtgttattttttgactttccagaactaatttatagaattctttccatttatgctgtgaaccaacaattgcgcccccaataatatatacatgattgccaatcatgaaatcaaaaacctgttgttgagatgtgacagtaagccctttttttatagtgaaaagatgcatcttactttcatcaaatgggaaatcccaaattttcaatcctcgagttacatttggcttacggcaatagccaaaatctatccacgcaacaagaggcgttttcactaagcccatgttgatagctttatttacaaaataggccttaaggttacataccaaaacatactctggtgaccagtactctgggttttttaattgtcgaggctcaagtctatttgtaaacgactcatctttttgaattttttcgatacgacttctgatatatctaaatttcttttttatatcgataacgataaccgttgttggttttccgttgcgaatcgcttcaacccttggtttcaaatcgggagaagtgaaaataatcatctcattttcaagtgcggccagacgctcaaagtaactaaaataaacatcaactgaacgagctagtttttcacggaaccctttattagcagtccaatcccctctaccaatgtcaaaatatgcagtgataattgtggtggatgatttcattactaataagaccattaatat

SEQ ID NO: 1566 - DNA, 8447 bp, Escherichia coli
  Strain O55:H7
  modified_base (2478)..(2481): a, c, g or t
  modified_base (3213)..(3216): a, c, g or t
  modified_base (5049)..(5050): a, c, g or t
  modified_base (6311)..(6311): a, c, g or t
agaattatatcataaatattaacagaatgtatactgtatattatccattcaaatgcttccgttatttatcatacatcggaatattgatactaaagcactattcacatgcaaaaccaacatccgccatgaaggactagctaaaacccaaactagtttgttgcaattagcatccttgcacctctatgtaaagggctgaagggattcggatgtgatggtatgattacagacattcgtgtctgagattgtctctgactccataattcgaaggttacagttatgatcatcgttaccggcggcgcgggctttatcggcagcaacatcgttaaagccctgaatgataaaggcatcaccgatattctggtggtggacaacctgaaagacggcaccaagtttgtgaacctggtggatctgaatatcgcagactatatggataaggaagacttcctgatccagattatggctggcgaagagttcggcgatgtcgaagcgattttccacgaaggcgcgtgctcttccaccaccgagtgggacggcaagtatatgatggataacaactatcaatactccaaggagctgctgcactactgcctggagcgtgaaatcccgttcctgtacgcttcttccgcagccacctacggcggacgcacctccgactttattgaatcccgcgagtacgaaaaaccgttgaacgtctacggttactcaaaattcctgtttgatgaatatgttcgccaaatcctgccggaagcgaactcgcagattgttggcttccgctatttcaacgtttatggaccgcgtgaaggccataaaggcagcatggcgagcgtcgctttccatctcaacacccagcttaataacggtgaatcaccgaagctgttcgaaggtagcgagaactttaaacgcgacttcgtctatgttggcgatgtggcagatgtaaacctgtggttcctggaaaatggcgtttccggcatcttcaacctcggcaccggtcgtgcggaatccttccaggctgtagctgatgctacgctggcttatcacaagaaaggccagatcgaatacattccgttcccggataagctgaaaggccgctaccaggcgttcactcaggcagatctgacaaatctgcgcgcggcgggttacgacaaaccgttcaaaaccgttgctgaaggtgtaacggaatacatggcctggctgaatcgcgacgcataagagctctgcatgaaaatactggtgatcggcccgtcttgggttggcgacatgatgatgtcgcaaagtctctatcgcacgctccaggcgcgctatccccaggcgataatcgatgtgatggcaccggcatggtgccgtccattattatcgcggatgccggaagttaacgaagctattcctatgcctctcggtcacggagcgctggaaatcggcgaacgccgcaaactgggtcatagtctgcgtgaaaagcgctacgaccgcgcctacgtcttacctaactccttcaaatccgcattagtgcctttcttcgcgggtattcctcatcgcaccggctggcgcggcgagatgcgctacggtttactcaacgatgtacgcgtgctcgataaagaagcctggccgctaatggtggaacgctatgtcgcgctggcctatgacaaaggcattatgcgcacagcacaagatctgccgcagccattgttatggccgcagttgcaggtgagcgaaggtgaaaaatcatatacctgtaatcaattttcgctttcatcagaacgtccgatgattggtttttgcccgggtgcggagtttggtccggcaaaacgctggccacactaccactatgcggagctggcaaagcagctgattgatgaaggttatcaggtggttctgtttggctctgcgaaagatcatgaagcaggcaatgagattcttgccgctttgaataccgagcagcaggcatggtgtcggaacctggcgggggaaacacagcttgatcaagcggttatcctgattgcagcctgtaaagccattgtcactaacgattctggcctgatgcacgttgcggcggcgctcaatcgtccgctggttgccctgtatggtccgagtagcccggacttcacaccgccgctatcccataaagcgcgcgtgatccgcctgattaccggctatcacaaagtgcgtaaaggtgacgctgcggagggttatcaccagagcttgatcgacattactccccagcgcgtactgaaagaactcaacgcgctattgttacaagaggaagcctgacggatgcgggttttgatcgttaaaacatcgtcgatgggcgatgttctccatacgttgcccgcactcactgatgcccagcaggcaatcccagaaattaagtttgactgggtggtggaagaagggttcgcacagattccttcctggcacgctgccgttgagcgagttattcctgtggcaatacgtcgctggcgtaaagcctggttctcggccccnnnnaaagctgaacgcaaagcgtttcgtgaagcgctacaagcagagaactatgacgcagttatcgacgctcaggggctggtaaaaagcgcggcgctggtgacgcgtctggcacatggcgtaaagcatggcatggactggcaaaccgctcgcgaacctttagccagcctgttttacaatcgtaagcatcatattgcaaaacagcagcacgccgtagaacgcacccgcgaactgtttgccaaaagtttgggctatagcaaaccgcaaacccagggcgattatgctatcgcacagcattttctgacgaacctgcctacagatgctggcgaatatgccgtatttcttcatgcgacgacccgtgatgataaacactggccggaagaacactggcgagaattgattggtttactggctgattcaggaatacggattaaacttccgtggggcgcgccgcatgaggaagaacgggcgaaacgactggcggaaggatttgcttatgttgaagtattgccgaagatgagtctggaaggcgttgcccgcgtgctggccggggctaaatttgtagtgtcggtggatacggggttaagccatttaacggcggcactggatagacccaatatcacggtttatggaccaaccgatccgggattaattggtgggtatgggaagaatcaagtagagtgtcgttctacaagtatgtctcttgcagatttgccagctcaaaccgtttttcaaaannnnaatcttgaaataataaccaataagttgacatcggagataagatgacctcaacattatttttctctctcgagaaaaaaaactggatagcgtactggaacagagctctcgtattcttattcattaccacctattttttgggtgggattacaaggtataaacatcttattgttattcttatgacaataacgacaatcgtctatctctgcaaacggccaaaacactatctctcactatttaaaacatttctttttggtagtgttgccatattaactattgctgcattgctgtcacttcttcaatcccctgatgcaggtgctagcatgaaggaaattttcaaagctattattgagaatactttactatgcacaatagcaataccgatcatattgagagacgagaaaagagaagatgtcgaaaaaatcgttttcttctcatttattagtgcgttgggcttacgctgtttttctgaattgattacctattataaggactatcaacaagggataatgccattcgcagattatagacaccgtagcatttctgactcgatggtctttttattccctgcattgttaaatctctggcttatcaaatcagcaaaataccgcatttcttttgtggttctaagcgttatttttatttttctgatattaggaactttatccagaggggcctggctttccgtgttagtcattggattaatatggattctgatgtttaaacaatggaagttactattagtaggagtaatggttgccatcattgcattgtcggttattttcacacataaggagatgaccgcaaagctaacgtataaacttcaacaaactaatagttcttatcgctatgcaaatggtactcaaggcagcgcactcgatctaatattagaaaatcctgttattggttatggttacggtaacgttgcatataaagatgtctataataaacgtgtcattgattatccagaatggacctttagacaatcaatagggccacataattttgcgctattcatctggtttggcactggtttattagggctggtaagtcttatgatgctatactgtgcaatattgaaagagtgtataaaaaatggcgtcaagaataaatatcgctcaccatataatgcatattatataatcttactatcttttataggttattttgttatccgtggaaacgtagaacaaattgaaccaaatttattaggcgtttacgccggcttattattagcgatgaaaaacaagtaaaaaataaaaaaggctgcataatgcggcctttttatttattcaaaccaattatgaataacctcttcgaatctttgagttacgccatcccaactgtagtgatcaaacacaaagtcctgaccttgctttgcaactgctgttaattcaggattcgctaacgtttttaaaatatcgctgcttatggagtctgcagtcataggttcttttaaatggaatcccgtagtattttctttgacaaattccgtcatccccccacgcgtactcactaaaacaggcttaccagcacccatagcttcaattgccaccatgcaaaatggttcctggaactgggaaggaatgacgactaaatctgccagtgggtaataacaatgcatcttttcaggcggtatgcttcctaacataatgcaacgatccttcaaacgttttgcaatttccctgacattgcgttgatatgcacctttgtcacttttactcatttctgtataatcaccaatcacaactaattttaaatttttgtgagcagcggccaatttttcgaatgattgcatcaacagcaatatgcctttgtcagggacgatacgcccannataaaaaataattttctcttcaggggagatattaagttcgcttctagtgatcggctgaaaattagattgataggtttctaaatcaattccatttggtacaatctcaatatctgcatttgctaaataagattggtaatactttttcaagtataaactaggcactatcattttaacattttgctcaagcaattttggttcaaatgcattatgcatatgtataaccactcttgcctgaggagctcgcttacgaatttgagtgtatagcttcatgctattatgaactacaataacactttctttcgttataggaaaatcatgtgcaatattcaatattctctgtgaatatggaagaggatcaagtcttgtccatttttgaaataaccgcttatatatgcgactgaatccaaccctatgaatactacaattatcattaacaaaggtgtaatttgagtatcctggatttttgatacaaacaatacgatttggaaaattggtacgctgagcaacctgatacatccacgtttcaacagcagccgctccgcgaggaggaattgaaaaaataggagtaaccgtaaatattattttatcaaccatctcgtatattaacctttcataacattatatttaattgctgtaaaaacaccatcgagaaattttttctggtaaagcaagtgtttatatttttctttgtactcatgttttttaacagcttttttataaggtatatttctccatggtgatatattataaatattacgaaaataatctgcagaggcgtagttcgcccaatcatgccatggcttagttataccagtataatgtatgaagacagtgtcatcattaataaaccgggtgtaatattcactatttttttcttcaaattctgactttatagtataaatacaattatattttctcggtaatattttagcatgatgtagaaacattaagtttaaaatatcttgatccgggtactttaatttttttataattgactcatctgataatagatcaaagaatttttccgttagtctttgttttaaccattcccgtaaattaatatacattacaccagagttaaaatagctaccgttaaaatcctcattacacaaacgctcagcgcttttactttgcatagcatctacatcaattaccactgccccatattcatctttaaactctaatgctattaactcgttcaatgaacccttacagacgatatcagcatcaagatataataatgaatccaatcgcgcagaanaataatcaaatgaaagcaaacgataataaatagatactggccagatatttgattgaggtagcgccttcaatggctcagaatcaatatgatataatttaattactgtttgatacttcgttgctaattgtgataataattcaatatactctttgtctaagtaatcagcgattatgtgaaaggtaaatttgttttgtttattattttcaagaattgaagcaattgaaatcgcagccccaacctggtagttctcatcaataccccatgagacattaaacgtttcccgttcatcaagtttaacggggcgcttgtccagttcaattatatctttaaattgagtaagatgtttaaaatccaatttaattacccttcatcataatcattatttgctcttcaatcctagtttgacttttacatccctgattacttttttaattttctttttgaatataagatatgtatagccaaagtctttcaattcattttttatattatagtgccgttcaagatcaatgcgatcttttgcttttaaaacagcggttgtttttttacctgaaaggtcaattagtcttaaacctttttcggatactataaaatttcctttatgaggatcgccagacaccattccatgctgatgcaactcttttatcgattctgataattgatccttcagatcttcagaaatttccaaatactcatttaacccgacaccttcaatatactcaatgagcataatataataatgagcgaaatttaatgttttacgttcagctagcaaaaaatagtcattaattgattggatgccttcaccacgtacccgatcggtttgataaattaaattttcataataatctttttttatgcaagattttaagaaacgttcggtcattttatgctttggcgcataaactttaagtacaagaggtccacgagcagtgtcaataagaatgactttagtatcatcaatagaacgaaaaacttttaatgttttaaccctgcaagttaaaaagtcatttagaacttgctcataaaagggatcattatcttttatgaaaactttcaacccatttatcgttttattatatatcataatgaattattttaaccttaaatctttagaagcatttttctttataatactttaaataattaaaaatgcctgccatataatgcttttgtttaaatttatgttttgcacaataccgatactgattgctatttacaggtttaagtaaatcttctttactccacggagaagctgctttggcgatcaaaaaactacgtgacaccggatagtcagcccactcatgccaaggttttgtaggtcccacatagtgtataaacacggtgtcatcattgactggattatcaactttgtcttttaattcatagttaatactatatcgggtattatatttctccgaaataaacttcactttaccattcaataatacattcagtacatcttgatcaaggtgggtgattttacttacccaatctgggtcacgcaacatttcaatagcttttgacgaaatgttatttagattccactcatcaatatttatcagtaaaaaaccagcattgaaatatccagaagctaactgtggtgtagttaataccgaggctcgattttgccaccattcaacatctctttcagctacaactgcggcaatttcattagtagaaaattgataatctaagagttctttaatactacccttgcaagcaatatctgcatcaagatatagtattttttcatgtttatgatagaaataatctgcaattataaatcgaaaatatgttgcgtaagtccagtttttcgtgcttggtaatgacttcagcttatcacaattgataacataaatattaattcttgaattatattgttttgctaaatcagaaaaatataatttgtctttatcactgatataatctgtgaaaacatgaaattcacaagagatttctctattgtttaatagaatagatgcgatggctacaccacatccaaaaagaaaatttctgtcaataccaaatgctatatcaagagtatttttagatcttatattttgataatgaaaattatactcaaaaaggatgatgtcactatcattgagttgagacatatttattctgtatcca

SEQ ID NO: 1567 - DNA, 8385 bp, Escherichia coli
  Strain O55:H7
  modified_base (3603)..(3603): a, c, g or t
  modified_base (3982)..(3982): a, c, g or t
  modified_base (4277)..(4277): a, c, g or t
  modified_base (5378)..(5378): a, c, g or t
  modified_base (6677)..(6677): a, c, g or t
  modified_base (6713)..(6713): a, c, g or t
  modified_base (6885)..(6885): a, c, g or t
  modified_base (8263)..(8263): a, c, g or t
aaaataagttacgggttacaacgattttcgaatcgttctttccctgatttttgtggcttttgcttctgcttgcgacagcagtccttgttcctgcttgagaatgtctttaagcggggcggcaaaatacactttcataaaccgccagatatcccgctgagtcaggccgatattcatcgaagaaaaataaagcccaataagatctttatcccgccaacgacgtggaacgcgcgtgcgaagctgcgcccggtgcaggtcaattaccgaaatttttaactcctcttccttaccggaaaaaggcaagtgcagcaggaaatgacagatataacagtcacggtggttaatgcccgcagcatgcatatcgtgcaccatcgtcgcgacacgcttaataagcatacgctttacgcgaacatctggagggttagtcgcccagtcagcacagtaatcttcaagacttatggttggtgtcagatcttcggtaataataaatgaagttctggtcagcggattcatgcctttttcgccaaatgccaccccatacatagtatcaacgccgacatcccgcagtcgatgaatcgcattccattcgcggtctgcgcctaatactggcatccgcaatgagagtaaatttttgattatctctttcagggtcgtgccgcgatgccatttgagaaaatagcttttgcccgccatttcaaatcgcagagtgcggcgagtttccagttcacgaaaaacctcaccctgcaaggttttaacttcctcaaaaggatctttaccgcgccataacgtggcaaacggctctttaagttcaaccatccagaccacccgttatgatatccgccgctttctctggcagactgtataaatcttgtgtatcagcataatgtcgcgcattttccgcccaggcctggcgcaatgaagattgcgttaacgctttgcgtaaaatctcattcaatgtttcctggcggaatggctcagcaatagcctcgccgcaattggcgtcgacaatataatgcgcatagccacaaacggctgttgttagtaccggtaatcctgcagtaatcgcttccagtagcacaattcccgctgcttcctggtaggcaggatgcagtaataaatccgccgccgccattaattccgagacatcgttgcgccccgagaagaagtgaacattactgcgcacgccgcgtttttctgccagcgcctcaaattttcgcggtttatcctgtccaacaacatatagcaatgtgttgtggcgcagcgaatccggtaacgaagcaagtgcttcaatggaacgatcgacacctttacgcgtgaagtctgaaccgacctgcaacaataaatattgttgttcggttattccattcttcttacggaagatttcacggctattagctggctgctggctatatttacgatcaggataaatccccggtggtagaatatgaaaacgctccgcttcagtctgataatgtttctggaaatcggcgatttgcttatctgtcagcatcagcagctgtgtcggcttgccctgttcgaaggttgcccgctcaaaggcggcataatggcgataacgtgacgtcaggtgatagaaaaagcctttttcctgcgcgactttctcggcataacaaacatcagcggcataataaacgtccagccccggcattttgttgaatccaacgactttatcgacgggatgttcgcgtaaatgtttttgcacccaggcaaaatactccgcattgcgcccgtgattggtatgcgatttaaccggcactttgatcagttcaaatacatcagggcattcgccttcccacgactgggtataaacccgaacatgatgacctcgggcggcgactgtctgagcaatacgcataaaatcgcgctgcaaaccgccaaagggaaaatatttatataaacaaaaagcaacgatcataacgacgtacctgtcgtggaggagggcagtaatttatcgacagcagcaatgacatctgccgccggaataaccgaaagatacatctcatttcggtcacgctgatcgcgcgttggcatttcccggtaatctcccgcccagaattgaatcatgttatttgaccaaggacgccagaaaatatggtctgtcgcaccaaacagcgatatcagcggcgtattaactgcagcggcaatatgcgccggtgcggaatcaacgccaataaacagctgcgcatgatcgattaacgcaccaagttccgggaaggtcacctttccagccagcgccgttactggtggcgtctggcatccttgcgcaatttcattgacgcaggccagatcgtctttatctgggccggacgtcagaacgacttcataaccacgagcatgtaaggcatcaatcacagcggaaaacttggcgttgtcccagcatttgaagatttgccgcgccgtaggttggataaccacataattttgtccaacaccagcgtgatcaagttcgcgacgcatacgtttccagcttgcaggcgggtaactcatggttgtctgcttcaccaacgaatcaagtcccaatggtgtcagcacggataagttactttccaccacatttccaccctgcaacggcaccaaatgggtgaaacttttacgccaaaaagcagactgccgatgatgataatcctgggaaattttcacacgggcatttaataagcgaaccagtatagcaaccatccattgatcggtaagattgacgataaggtcatacttattggcacgtaataccttgatgagatgaaaaaagttggcaattttttctgaggcttttgcttttttattttttatgccgtagagcgcgttaatctctggattttcagacaggatcgggatggtgtcctgataaagcagcacatcgatttttgcgtcagggtaattttttttcagcgaactaatgacgggagtagttaataacatatccccatgaaaacgcatcttaatgagcaaaattcttcgaaatggcttatccacaagtaactctttttgttgagattatccgattaaggtgaagcagaaaaagcacgctaccgccccaggctcaacagctacctgaatactgataccgcactgatattgacgcgctagtgtatcacttctttcgcggcaatccgacccgaatgatttttaagcacattgttgattttcaataaagaaatcaatcaaataaaatcattagcaaccatattctttcactgttgctctgcgattccttcctgcacgtacagcagaaatcaatgaatcgcataaaaatacaaaaaaagtatagatgttcagcaagaattggcgggtaaattgctatttaagtcaaaaacgggaaaagtaatggtaaagccacagctaaatacatagaatccccagcacatccataagtcagctatttactatgctcgaattgctttacaccgcccttctctaccttattcagccgctgatctggatacggctctgggtgcgcggacgtaaggctccggcctatcgaaaacgctggggtgaacgttacggtttttaccgccatccgctaaaaccaggcggcattatgctgcactccgtctccgtcggtgaaactctggcggcgatcccgttggtgcncgcgctgcgtcatcgttatcctgatttacctattaccgtaacaaccatgacgccaaccggttcggagcgcgtacaatcggctttcgggaaggatgttcagcacgtttatctgccgtatgatctgcccgatgcactcaaccgtttcctgaataaagtcgaccctaaactggtgttgattatggaaaccgaactatggcctaacctgattgcggcgctacataaacgtaaaattccgctggtgatcgctaacgcgcgactctctgcccgctcggccgcaggttatgccaaactgggtaaattcgtccgtcgcttgctgcgtcgtattacgctgattgccgcccaaaatgaagaagatggtgcacgttttgtggcgctgggngcgaaaaataaccaggtaaccgttaccggtagcctgaaattcgatatttctgtaacgccgcagttggctgctaaagccgtgacgctgcgccgccagtgggcaccacaccgcccggtatggattgccaccagcactcacgaaggtgaagagagcgtggtcattgccgcacatcaggctttattacagcaattcccgaatttattgctcatcctggtaccccgtcatccagaacgcttcccggatgcgattaaccttgtccgccaggctggactaagctatatcacacgctcttcangggaagtcccctccaccagcacgcaggttgtggttggcgatacgatgggcgagttgatgttactgtacggcattgccgatctcgcctttgttggcggttcactggttgaacgtggtgggcataatccgctggaagctgccgcacacgcaattccggtattgatggggccgcatacttttaactttaaagacatttgcgcgcggctggagcaggcaagcgggctgattaccgttaccgatgccactacgcttgcaaaagaggtttcctctttactcaccgacgccgattaccgtagtttctatggccgtcatgccgttgaagtactgtatcaaaaccagggcgcgctacagcgtctgcttcaactgctggaaccttacctgccaccgaaaacgcattgaggttgttatgcaaaaacgggcgatttatccgggtactttcgatcccattaccaatggtcatatcgatatcgtgacgcgcgccacgcagatgttcgatcacgttattctggcgattgccgccagccccagtaaaaaaccgatgtttaccctggaagagcgtgtggcactggcacagcaggcaaccgcgcatctggggaacgtggaagtggtcgggtttagtgatttgatggcgaacttcgcccgtaatcaacacgctacggtgctgattcgtggcctgcgtgcggtggcagattttgaatatgaaatgcagctggcgcatatgaatcgccacttaatgccggaactggaaagtgtgtttctgatgccgtcgaaagagtggtcgtttatctcttcatcgttggtgaaagaggtggcgcgccatcagggcgatgtcacccatttcctgccggagaatgtccatcaggcgctgatggcgaagttagcgtagcgtttatgccggatggtatgccatccggcgcgcatgaattacttctggcactgccgacaataaaacgttgcccgctgcgcatgtttagtcgccacaatcggcgtaccgcacacccgacacggctcaccttttcgcccgtaaacctgcaattcctgagcgaaatagcccggtttaccatcactttgcagaaaatctttcagcgttgtaccaccctgntcaatcgaacgcagcaacaccgctttaatcacccgagctaacaattcacactctgccagcgacagtgatgacgccagccgatccggatggatccccgccgcaaacagtgattcgctggcatagatattccctacccctaccaccagcttgttatccatcagccacggtttaatcgccgtttttttcttcgcgcacttctgatgcagatactcaccattgaaatcgtcgctaagcggctccggtccaagatgggccagcacattatgcccttccagctctttggtccacagccaggcaccaaagcggcgcggatcggtgtagcgcagcactttgccgttgctcatcaccaaatccacatggtcatgcttttcagggggaagttcttctggaaggatgcgcaggctgccagacatccctaaatgaatgataatccagccctcaggcagctccagcagcagatatttagcccgccgctgcacgctaagcactggttggtcgcttaaacggtagatctcttctgaaaccggccagcgcaagcgtccgttgcgcaccactgcatgaagaatggttgcaccaacgagatgcggttctatgccgcggcggctggtttcaacttcgggtaattcaggcatagcatctccaggaatgaacagatgcagtcaatatgggggcaagcagataacaaaaaaccccgccggagcgaggttttttgttacatcaaagcgagaattatttgattttcgcttctttgtagatcacgtgctggcgaacaactggatcgaattttttcagttccagtttttccggcttagtacgtttgttcttcgtagtggtatagaagtgaccagtaccagcagaagaaaccagcttgattttctcacgaatacctttagccatgatttatttcctctaagtacttagtacttttcgccacgggcacgcagttcagccagaactgtatcgatgccttttttatcgattacacgcatacctttagcagatacgcgcagggtgacaaaacgcttctcgctctcaacccagaaacggtgagagtgcaggttcggcaggaaacggcgtttagtcgcgttcagtgcgtgggaacggttgttaccggtcaccggacgcttgccagtaacttggcagactcgggacatgtctattctccaaaaatcaaattagctcgagcttcgtatggggtattggcgcctcgtcaggctttacagcccggtcatcgcagttctatgtgaactctcgattgccaggcccaaatgccaaacccgagattctcaaaggtggcgnagtatacgctgactcagcgatgtgctcaagtcccgnacagacaaagatcccgaaggatcgcgcatagcgggttaaatccagccgcgttcggcaaaagaaacatactctccacgcccaatcacgatatggtcgagcacgcgtaaatccatgaactgacaactctttattatccgttcagtaatgagtttatccgctttactgggttcancacaacccgaagggtgattatgtgcaaggatcagcgccgaggcgtttatttttatcgcttcgcggataatttcccgaggatggacttcaacatggtttagcgtgccggaaaaaagacggctatgcgttataacccggtgttgggagtcgagaaagatcaccataaagatctcccgctcctcacccgtgagctggctttgtaaaaattcccgcgtcatctccgggctgagtaaagggctttcttcacgcatccgcacgttgtagtaacgtcgcgccagttcagcaatcccctttaactgggcaaatttcgctacgccaattccatgaacaccactaaattgttcatattcagaggttaacaagccataaagagagccgaaattctccagcatctcttttgccagggttaatacatctttaccgcgcgttccggtacgcagaaatagcgccagcagctcgacatccgttaaggcgctaataccaaacttcagcattttttcgcgcggcatcaacagctgtgcattgtttttcaccttcacctcctttgtggtgctcgcatcctgtcatagccgttccgttaaatcgacggccagttttcaatcctggaaagcgcctcgcaaagcgaatctcaggtgaaggcacgacaacaaaagtattgtgataaaatcgccaacttctggtgtcacccaacaggaaaaatcatcatgagcctggccggtaaaaaaatcgttctcggcgttagcggcggtattgctgcctataaaacccctgaactggtgcgtcgtttgcgcgatcgcggggccgacgtccgcgtagccatgaccgaagcggcaaaagcctttatcaccccacttagcttgcaggcggtttctggttatcccgtttccgacagtttgctggacccggcagccgaagccgctatgggccatattgagctgggtaaatgggctgatttagtgattctcgcccctgccacggcagatttgattgcccgtgttgctgccggaatggcgaatgacctggtatcgacgatttgtctggctacacctgcgcctgtagccgtgctccccgccatgaaccagcagatgtaccgtgccgctgccacgcagcataatttagaggtgcttgcttcccgtggtttgctcatctgggggccagacagtggcagtcaggcttgtggtgatatcggtcctgggcgaatgctcgatccgttaaccattgtggatatggcggtagcgcatttttcgcccgtcaacgacctgaaacatctgaacattatgattaccgccggcccgacgcgtgaaccgctcgatcccgtgcgttatatctctaatcacagctccggcaagatgggttttgctatcgccgccgccgctgcncgtcgtggcrcgaacgtcacgctggtatcaggtccggtttcactaccgacgccaccgtttgttaaacgtgttgatgtgatgaccgcgctggaaatggaagccgccgtgaatgcttctgtaca

SEQ ID NO: 1568 - DNA, 1831 bp, Escherichia coli
  Strain O55:H7
  modified_base (1072)..(1072): a, c, g or t
tttttatcggctgcgccgccgtggcggattatcgcgcagctaccgtggccccagagaaaatcaaaaagcaggccacgcagggtgatgaattaacaataaaaatggttaaaaaccccgatatcgtcgcaggcgttgccgcactaaaagaccatcgaccctacgtcgttggatttgccgccgaaacaaataatgtggaagaatacgcccggcaaaaacgtatccgtaaaaaccttgatctgatctgcgcgaacgatgtttcccagccaactcaaggatttaacagcgacaacaacgcattacaccttttctggcaggacggagataaagtcttaccgcttgagcgcaaagagctccttggccaattattactcgacgagatcgtgacccgttatgatgaaaaaaatcgacgttaagattctggacccgcgcgttgggaaggaatttccgctcccgacttatgccacctctggctctgccggacttgacctgcgtgcctgtctcgacgacgccgtagaactggctccgggtgacactacgctggttccgaccgggctggcgattcatattgccgatccttcactggcggcaatgatgctgccgcgctccggattgggacataagcacggtatcgtgcttggtaacctggtaggattgatcgattccgactatcagggccagttgatgatttccgtgtggaaccgtggtcaggacagcttcaccattcaacctggcgaacgtatcgcccagatgatttttgttccggtagtacaggctgaatttaatctggtggaagatttcgacgccaccgaccgcggtgaaggcggctttggtcactctggtcgtcagtaacacatacgcatccgaataacgtcataacatagccgtaaacatttcgtttgcggtcatagcgtgggtgccgcctggcaagtgcttattttcaggggtattttgtaacatggcagaaaaacaaactgcgaaaaggaaccgtcgcgaggaaatacttcagtctctggcgctgatgctggaatccagcgatggaagccaacgtatcacgacggcaaaactggccgcntctgtcggcgtttccgaagcggcactgtatcgccacttccccagtaagacccgcatgttcgatagcctgattgagtttatcgaagatagcctgattactcgcatcaatctgattctgaaagatgagaaagacaccacagcgcgcctgcgtctgattgtgttgctgcttctcggttttggtgagcgtaatcctggcctgacccgcatcctcactggtcatgcgctaatgtttgaacaggatcgcctgcaagggcgcatcaaccagctgttcgagcgtattgaagcgcagctgcgtcaggtattgcgtgaaaagagaatgcgtgagggtgaaggttacaccaccgatgaaaccctgctggcaagccagatcctggccttctgtgaaggtatgctgtcacgttttgtccgcagcgaatttaaataccgcccgacggatgattttgacgcccgctggccgctaattgcggcacagttgcagtaatatgacgccggatgacttttcatccggcgagtttctttaaacgccaaactcttcgcgataggccttaaccgccgccagatgttccgccatttccggcttctcttccaggtaagcaatcaggtctttcagggtgatgatagagatcactttgcagttgtaatcacgctcaacttcctgaatcgccgaaatctcgccgcgcccccgttcctgacgatcaagcgaaatcaacacgccagcaagcgtcgcgccattagcctgaataatctccatcgattcgcg

SEQ ID NO: 1569 - DNA, 24476 bp, Escherichia coli
  Strain O55:H7
  modified_base (1733)..(1735): a, c, g or t
  modified_base (4953)..(4953): a, c, g or t
  modified_base (6609)..(6609): a, c, g or t
  modified_base (8306)..(8306): a, c, g or t
  modified_base (13546)..(13546): a, c, g or t
  modified_base (13829)..(13829): a, c, g or t
  modified_base (17544)..(17544): a, c, g or t
  modified_base (22120)..(22120): a, c, g or t
  modified_base (24427)..(24427): a, c, g or t
  modified_base (24433)..(24434): a, c, g or t
  modified_base (24473)..(24473): a, c, g or t
ccgttccggcggtgatcacatcatctaccagcattacgcgtccttgtaacgcgctaccaaccagattgccgccttcaccgtggtcttttgcctctttgcggttaaagcagtacggcaggtcaaggtcatgatgctccgccagcgccacggcggtagtggtggcaatcgggatccctttgtaagcagggccaaacagcagatcgaactcaaggccggaatccaccaacgcttcagcgtaaaaacggcctaacagtgccagatcgcgcccggtattaaacagcccggcgttgaagaaataggggcttttgcgcccggacttcaacgtaaactcgccaaactttaacacctgcttgccaagcgcaaattcaataaactggcgctgatatggtttcatgccttcgctcctcatcttacttttctacagacaaaaaaaaggcgactcatcagtcgccttaaaaatcagtttgccagcgccgccttctgcgtcgctacaatggattcgattccccctcgggccagagccaacaaggtgagtagctcttcatgggtgaacggctcgccttctgccgtcccctgcacttcaatgatgcgcccgtcttcggtcatcactacgttcatgtcggtctctgcggcagagtcttcaacgtattccagatcgcaaaccgcttcgccgttcacaattccgacagaaactgcggctaccatccctttcatcgggttggttttcagcttgccgttttccaccagcttctgtagcgcatctgccagcgccacgcaggcacccgtaatcgacgcggtacgcgtgccaccatcagcctgaagcacgtcgcagtccagcgtaatggtgaactcacccagcgctttcaaatctactgccgcgcgaagagcacgggcgatcagacgctggatttccattgtgcgtccaccctgcttacctttcgccgcttcacgagcgttacgggtgtgggtagaacgtggcagcatgccgtactctgcggtgatccagccctggccctgacctttcaggaagcgcggcacgccttcttcaatagaggcggtacacaacactttggtatcgccaaattcgaccagcaccgagccttctgcatgttttgtatagttacgagtcagggtaacgggacgcacctgattattgctacggcctgctggacgcatattgaaatctccggcttgaaacaaatgtggctgcgcattatacggacttccggcggttattcctatcctgacaaggcatcgatggctataatccttccacctctccttttataaacaggaacgtctatgatccgcagtatgaccgcctacgcccggcgtgaaatcaagggcgaatgggggagcgcaacctgggaaatgcgctcggtaaaccagcgttatctggaaacttactttcgtctgccggagcagttccgtagccttgaacctgtcgttcgcgagcgtattcgttctcgcctgacgcgcggtaaagtggaatgtaccctgcgctatgagccagatgttagcgcgcaaggtgagctgatcctcaacgaaaaactggctaaacagctggtaactgccgcgaactgggtaaaaatgcagagtgacgaaggggaaatcaacccggttgatattctacgctggccgggcgtgatggcagcccaggagcaggatcttgacgccattgccgctgaaattctcgcggcgctggatggtacgctggacgactttattgtcgnnngcgaaaccgaaggtcaggcactgaaagcattgatcgagcagcgtctggaaggcgtcaccgccgaagtggtcaaagtccgcgcccatatgccggaaatcctgcaatggcagcgtgagcgtctggtcgcgaagctggaagatgctcaggttcagttggaaaacaaccgtctggagcaggagctggttctgctggcacaacgaattgacgttgccgaagaactggaccgcctggaagcgcatgtcaaagagacctacaacattctgaagaaaaaagaagccgttggtcgtcgtctggactttatgatgcaggaattcaaccgcgagtcgaacactcttgcgtcgaagtctatcaatgccgaagtgacaaactccgcgattgagctgaaagtgttgattgagcagatgcgcgagcagattcagaacattgaataactcgtaacgccaattcttacttttcagccttcacaaatgccgcccactcaaacagagcggcatttttcttccccgcaacttcaattctgttttgcgtgcctgctccagattttgtgatgtttttttgcccagcacactgagaacgtgagacactcacaactgtatataaatacagttacagatttactttctttgcaatcgatatcacatggagtgggcaatgaacgaacatcatcaaccttttgaagaaatacggcattatggcactgaagggcaagaattttggtcagctagagaattggcaccgttactggattatcgggactggcgcaattttcaaaaggtactggcccgcgcgactcaagcgtgcgaagccagcaatcaagctgcatctgaccatttcgttgaaaccaccaaaatggttgtattaggttcaggggctcaacgagaacttgaagatgttcatctctcccgctatgcctgttacctggtagtacaaaacggcgaccctgcgaaaccggtcattgcggcagggcagacttattttgctatccagacccgacggcaggagcttgctgacgatgaagcatttaagcaacttcgtgaagacgaaaagcgtctgtttctgagaaatgagttgaaagaacataacaaacaattggttgaggcagcacagcaagctgcggtagcgacagctactgatttcgccatatttcagaatcatggttaccaggggctgtatggtggattagatcagaaagccatccaccaactgaaggggctgaaaaagagtcagaagatcctggatcatatgggttcaacagaactggcggctaatctctttcgagctacccaaacagaagaaaaactcaagcgggatggcgtgaattcaaaacagcaagctaataccacacactttgatgtgggtagcaaggtgaggcaaaccattcaggaacttggcggaaccatgcctgaggagttgccgaccccgcaggtcagcatcaagcagttggaaaacagtgtaaaaattacagagaagaaatagcagaaactaaaaactctttttgttgattgagatacccgatgcgtaagccaaagtccaggtgcggtgaacacaatggctaaacattgcacctttcttttccacccctcaattttaacctattttttcttatgcattttctcagacaagaagtcagaagaatgcatctacgctacagaaaatagcgatttcacataactacaagttatcaatttcctctcaccttaaaaaatctcaatcgtgacaatacgcacaaatcgctaccctgccagacagatttttagggagagaaccatgctgttacacattttgtatttggttggcattactgccgaagccatgacgggggctctggcggccgggcgacgccgcatggatacatttggcgtaattattattgcgaccgccaccgcaattggcggagggtcagtgcgcgatattctgctgggccactatccgctcggctgggtcaaacacccggaatatgtgattatcgtcgctaccgccgcagtactcaccactatcgttgctcctgtaatgccttacctgcgcaaagtgtttctggtgctcgatgcgcttggactggtggtcttttctatcatcggcgcacaggttgcactggatatggggcacggcccaattattgccgttgtcgcggcggtaaccaccggcgtgtttggcggcgttttgcgcgatatgttctgtaaacgtatcccactggtattccagaaagagttgtatgccggtgtctcatttgcctccgccgtgctgtacatcgcgctgcaacactatgtttctaaccatgatgtggtaattatctccaccctggtattcggcttttttgcccgcttactggcgctacgccttaagctgggattaccggtcttttactacagccacgaaggacactaaggttcaaaacctgtgatctgctgggcagccagccaactgcccagcttcttgatttgcgcattttccttccattcaataacctgtctggcgcgccccgatccagtccccggcagctgctgccagaactgctccgtgctaaataaaagttgcgaccaggaccgttcatcactggcattaagcgccgcccgggttagcggtattcccattgccatcacccagcgagtaaaaggctgcttacgagccagattaaaccgatgccatagctgcgcacttttacttttcgcgatccccggcgtgttctgtaattgctctggcgttaataaaagccaggaaaagatatgctcaaagcgatgagtctgatgcagcgcgcgccagccggcctcaccaatgccatccagccccagaacctgttttgaccccagccagactaagcgtgaaatgaactgttcctgacaaacatcagaagcaaagtagcaggtcaacgagttaaagcggttttctggtggtgtcggttttgtacgttctgcaccgcgccagaccacatcatcaatgcgaggaataccctgaccggcaaggctgacgaggatctgatcaccaggcgcaatatcccactcctgccagcgcctgacggaaccaatattcacccgctggacttttttatcatccagcatgacaggtgcgagtgacgcaaccaccgatattttaccgctcttacccaccgcaaactgaatcgccttcacttcggcaacctgagctacaggttgatatttccaggccaccagccattctgcctggcctggtagccaatggcgggattcgggttctttcgcccntcgcacaaccacgccatcggtgacgaagggtaatttcgctttccaccactcattgcgtacgcgcgcaacctcatcagcatttttaaccgcacgggtatacctctgcgttagagtaaaacctgcggtagccagctcctttaaacgatcggtcattaactgcggtccatccggccatgcccagacaaaaacgcccagagaattcagcgtgtcgctatcgtcctggcgcatcatcaggccagcaacttttgcgcgggcatttattccccccatttgttgttggatatgcccctcgcgctggagaaatatttccccctgaagcgtactgttggctaaaggcccgctaacggtttgcggcacagcggaaattaagctaactttctgcgtccagtcctcgcctttcaggccattaccgcgactgattgctttgttcagtttcccgtcccgataaaccagggttaccgcaacgccatcaacttttggctgcacccaaagatcgctacgttctcgcatccacagacttaatgcgtttttatccgccattttgcgtacacccgtatgggcaaccggatgcataaccgcaccatttaaaggcggcatcatcacgtcgcggggctcgctcacaaagcagcgttgccactgcgtaagacgggcgcttaactgatcgtaaacaccgtcttccacctcactttttccttccttccagtagtcatcgtcccactgttttatttgctgttgcaggcggaaaatttcttcctgtgctctggctggcgaccaggccggacagaccgcccacacagatgattgccagcacaagatacttattaatatcgccatccatactttcatcttcacctccgctgtagtcaggctggcagatatacaacgtggtgaaggcaaagccgagtggcaaaaacggagtctgcgaggacgcttcctgagaatcgtctttattgcagtaaatcacaggcaaatgcggaaacagctacgcaaaacgcaacaactttgcgcaaaaagtgtgagcaagggctacgtcacatggccgcgccgtgtataataagctcgtatgtaggctttatttcgctaatcacatacgaaagatactcatggctcaaggcacgctttatattgtttctgcccccagtggcgcgggtaaatccagcctgattcaggctttattaaaaacccaaccgttgtatgacacccaggtttctgtttcacacaccacacgccaaccgcgtcctggtgaagtccacggtgaacattatttctttgttaatcatgatgaatttaaagaaatgattagcagagatgcgttcctcgaacacgcagaagtttttggtaattactatggcacttcgcgtgaggccattgagcaagtactggcgaccggtgtcgatgtttttctcgatatcgactggcagggcgcgcagcaaattcgccagaagatgccgcacgcgcggagtatctttattttaccgccgtctaaaattgaactggaccgccgtctacgcggtcgcgatcaggacagcgaagaggtcattgcaaagcgtatggcgcaagctgttgcagaaatgagccattacgccgaatatgattacctgattgtgaatgatgacttcgataccgcgttgaccgatttgaagaccattattcgcnccgaacgtctgcgcatgagccgccaaaagcagcgtcatgacgctttaatcagcaaattgttggcagactgaacctgatttcagtatcatgcccagtcatttcttcacctgtggagctttttaagtatggcacgcgtaactgttcaggacgctgtagagaaaattggtaaccgttttgacctggtactggtcgccgcgcgtcgcgctcgtcagatgcaggtaggcggaaaggatccgctggtaccggaagaaaacgataaaaccactgtaatcgcgctgcgcgaaatcgaagaaggtctgatcaacaaccagatcctcgacgttcgcgaacgccaggaacagcaagagcaggaagccgctgaattacaagccgttaccgctattgctgaaggtcgtcgttaatcacaaagcgggtcgcccttgtatctgtttgaaagcctgaatcaactgattcaaacctacctgccggaagaccaaatcaagcgtctgcggcaggcgtatctcgttgcacgtgatgctcacgaggggcaaacacgttcaagcggtgaaccctatatcacgcacccggtagcggttgcctgcattctggccgagatgaaactcgactatgaaacgctgatggcggcgctgctgcatgacgtgattgaagatactcccgccacctaccaggatatggaacagctttttggtaaaagcgtcgccgagctggtagagggggtgtcgaaacttgataaactcaagttccgcgataagaaagaggcgcaggccgaaaactttcgcaagatgattatggcgatggtgcaggatatccgcgtcatcctcatcaaacttgccgaccgtacccacaacatgcgcacgctgggctcacttcgcccggacaaacgtcgccgcatcgcccgtgaaactctcgaaatttacagcccgctggcgcaccgtttaggtatccaccacattaaaaccgaactcgaagagctgggttttgaggcgctgtatcccaaccgttatcgcgtaatcaaagaagtggtgaaagccgcgcgcggcaaccgtaaagagatgatccagaagattctttctgaaatcgaagggcgtttgcaggaagcgggaataccgtgccgcgtcagtggtcgcgaaaagcatctttattcgatttactgtaaaatggtgctcaaagagcagcgttttcactcaatcatggacatctacgctttccgcgtgatcgtcaatgattctgacacctgttatcgcgtgctgggccagatgcacagcctgtacaagccgcgtccgggccgcgtgaaagactatatcgccattccaaaagcgaacggctatcagtcgttgcacacctcgatgattggcccgcacggcgtgccggttgaggtccagatccgtaccgaagatatggatcagatggcggagatgggtgttgccgcgcactgggcttataaagagcacggcgaaaccagtactaccgcacaaatccgcgcccagcgctggatgcaaagcctgctggagctgcaacagagcgccggtagttcgtttgaatttatcgagagcgttaaatccgatctcttcccggatgagatttacgttttcacaccggaagggcgcattgtcgagctgcctgccggtgcaacgcccgtcgacttcgcttatgcagtgcataccgatatcggccatgcctgcgtgggcgcacgcgtngaccgccagccttacccgctgtcgcagccgcttactagcggtcagaccgttgaaatcattaccgctccgggcgctcgcccgaatgccgcttggctgaactttgtcgttagctcgaaagcgcgcgccaaaattcgtcagttgctgaaaaacctcaagcgtgatgattctgtaagcctgggccgtcgtctgctcaaccatgctttgggtggtagccgtaagctcaatgaaatcccgcaggaaaatattcagcgcgagctggatcgcatgaagctggcaacgcttgacgatctgctggcagaaatcggccttggtaacgcaatgagcgtggtggtcgcgaaaaatctacaacatggggacgcctccattccaccggcgactcaaagccacgggcatctgccgatcaaaggcgctgatggcgtgctgatcacctttgcgaaatgctgccgccccattcctggcgacccgattatcgcccacgtcagccccggtaaaggtctggtgatccaccatgaatcctgccgtaacatccgtggctaccagaaagagccagagaagtttatggctgtggaatgggataaagagacggcgcaggagttcatcaccgaaatcaaggtggagatgttcaatcatcagggtgcgctggcaaacctgacggcggcaattaacaccacgacctcgaatattcaaagtttgaatacggaagagaaagatggtcgcgtctacagcgcctttattcgtctgaccgctcgtgaccgtgtgcatctggcgaatatcatgcgcaaaatccgcgtgatgccagacgtgattaaagtcacccgaaaccgaaattaatgttttatgaacccaacacgttatgcacgcatctgcgaaatgctcgccaggcggcagcctgatctgaccgtctgcatggagcaggtccacaaacctcataacgtttctgcgattattcgtaccgcagatgccgttggcgtacatgaagttcacgccgtctggcctggtagccgcatgcgcaccatggcttcggcagcggcgggtagtaacagctgggtacaggtgaaaacacaccgcaccattggcgatgccgtcgctcatctcaaaggccagggcatgcagattctggcaacccatctttctgataacgctgtcgatttccgcgaaattgattacactcgcccgacctgcattttgatgggacaggagaaaacgggcatcacgcaggaagcattggccctggcggatcaggacatcatcattccgatgatcggcatggtgcagtcgctgaatgtttccgttgcctcagccctcattctttacgaagcccagcgtcagcggcaaaatgcaggcatgtacctgcgtgaaaacagcatgttgccggaagcagagcaacaacgcctgttgtttgaaggcggctatccggtgctggcgaaagtcgcaaaacgcaaaggcctgccttatccccacgtcaatcagcaaggcgagatcgaagctgatgccgactggtgggctactatgcaggctgcagggtaagtgccatgacaggtcgcctgttagatgctgtcccactcagttccctaacgggcgttggcgcagcacttagtaacaaactggcgaaaatcaacctgcataccgtgcaggatctactcttacaccttcccctgcgctacgaagatcgcacccatctctaccccatcggagaactactgccgggcgtttatgccacggtggaaggcgaagtgctgaactgcaatatctccttcggcggtcggcggatgatgacctgccagatcagcgacggttccggcatcctcaccatgcgctttttcaatttcagcgcggcaatgaaaaatagcctggcgacgggccgccgtgtactggcttatggcgaagcaaagcgcggtaaatatggtgcggagatgatccacccggaataccgcgtgcagggcgatctcagcacgccagaattacaggaaacgctcacgccggtttatccaacaacggaaggcgtaaagcaggccacgctgcgtaaattaaccgaccaggcgctggatctgctcgacacctgcgccattgaagaactcctgccgccggaactgtcacaaggaatgatgacgctaccggaagcgttgcgcactttgcaccgcccgccaccgacgctacagcttagcgatctggaaaccgggcagcatccggcgcaacgtcgtctgattctggaagaactgctggcgcacaacctcagcatgttagccttacgtgccggagcacagcgttttcatgcccagccgctgagcgccaatgatgcgctgaaaaataaactcctcgcagccttaccgttcaagccaacgggcgcacaggcacgcgtagtggcggagatcgagcgcgatatggcgctggatgtgccgatgatgcgcctggtacagggcgatgtaggttccggtaaaacgctggtcgccgccctcgccgcgctgcgtgcgattgcccacggcaaacaggtggcattgatggcaccaaccgaattactcgccgaacagcacgccaataacttccgcaactggtttgaaccgctcggtatcgaagtgggctggctcgccggtaagcagaaaggcaaagcgcgactgtctcagcaggaagccatcgccagcggtcaggtgcagatgattgttggtacgcacgccatcttccaggaacaggtgcagtttaacggtctggcgctggtgattatcgacgaacaacatcgctttggcgtgcatcagcgtctggcgttatgggagaaaggccagcagcaaggcttccatccgcatcagttgatcatgaccgccacgccgatcccccgcacgctggcaatgacggcgtatgccgatctcgatacctcggtgatagatgagctgccgccaggccgcacgccagtgactacggtcgctattcctgatacccgccgtaccgacatcattgaccgcgtgcgccacgcctgcataactgaaggtcgtcaggcgtactgggtttgtacgttgattgaagagtcagagttactggaagcgcaggcggcggaagctacctgggaagagttgaaactggcgctaccagaattgaatgttggcctggtacacgggcggatgaaaccagccgagaaacaggcggtgatggcgtcgtttaaacaaggtgagctacatctgctggttgccactaccgttattgaagtcggtgttgatgtgcctaacgccagcctgatgattatcgaaaaccctgagcgtctgggtctggcgcagttacaccagcttcgcgggcgtgtaggtcgtggtgcggtggcttctcactgcgtgctgctctacaaaacgccgctctccaaaaccgcgcaaattcggctgcaagtgctgcgcgacagcaacgacggttttgtgattgcacagaaagacttagagattcgcggaccgggtgaactgttaggtacgcgtcagacgggtaatgctgagtttaaagtggcggatttactgcgcgatcaggcgatgatcccggaagttcagcgcctggcgcgacatattcacgaacgttacccacaacaagcaaaagccctgatagaacgctggatgccggagacggaacgttactccaacgcatgaccagactcatcacaagacaagtcacgcagtaaatcttcaatctggatagtgaggatatccattgcctcatacgcatcctgtgcaattcgcgccgccattgcgccttccggttcaccacgcagaatttcagccgctgcctgtacgccagccacaatcatttcaggtgttaacatttggcgaagaaaagcgcgattatcagaggaccagccatctttatggcctaatggatgcccccagcctatccattcttgcgaccataacggattggcttctatgggataaattagatgcgcggcatactgaatagcacacaccgcttttcctggcgtatccagcgcccaccagcgcgaccagagagaacgaattaacggcgcggccccacccagagtattgaacaccgccagccagcaaagaacgttattgaaaccacgctcgttatccatacgctgcaacgcggtgtccagtaaaaattgccgtacctgctggcgttgggaagcattcatcatctcctgccagagatagggccgacacaatgccttcattaaggattcttcgaagtgatcaccataaccgccagctaaaacggtttcatgccattgcgccaggcagagcggaaacagatagcgaaacaactctatttgcatcggttcgttataaacgagattgagtacatagtaagcactcaaatcccattcgctgatctgctgccactctttagccgccagcgccttgagttcggcatctgcgtaatcaaattccgtttcccatacacagagcactggcggctcatcaccaaaaatatggcgacagtgttcacgtagcgtttccggttccttccgacgctttttcatttttaaccggcaaaaatcggcaacattaaatacagcttaatcaccagcgcattgacgatatcgataaagaacgcaccgaccatcggcaccaccaaaaacgccatgtgcgacgggccaaagcgttcagtgatcgcctgcatgttggcgattgccgttggcgttgcaccgaggccaaaaccacagtgacccgcagccagcactgccgcatcgtagtttttgcccatcatgcgccaggtaacgaagatggcatacaacgccatgaagatggtctgtaccaccagaatcgccagcatcggcagcgccagcgaagccagctcccacagtttcagccccatcagcgccatcgccaggaacaacgacaggcttacgttacccagcacggataccgcacgctcaaagacgcggtaaaagcccatcattgacagaccgttgctcagaatcacgccaacaaacagtacacagacgaaggtcggcagttcaaaagcagtgccagccaaaagttgcgcaacaattttccccaccgtcaggcagatagcaatcagcgcgatagtttcaatcagcaccagcgaggtgatcatgcggcccacatccggcttttcaaacgccgtcgggacttcctggtcatccggaataccgttcggcgtggtggagtgtttcaccagatagcgcgccaccggaccgccaatcaagccgcccagcaccagaccgaacgttgcacaggccatcgccacttccgtcgcattggtgaagccataacgttcaatgaacaatttantccacgcagcgcccgtaccgtgaccgccggaaagcgtaatagaaccggccaacagccccatcagcggatcaagccctaacaggctagccataccaatgccaatggcattttgcatcaccaacagaccaacaaccacaatcaagaagatgccaaccacacgcccaccggcacgcaaactggcaatgttggcgttcaggccaatggtggcgaagaaagccagcattaacggatcgcgcagggacatatcaaagttgacttcccagcccatgctttttttcagtantagtagcgccagcgccaccaacaaaccacccgcaacaggttccggtatggtgtatttcttcaaaaaggagacggaatggaccaacttacgcccgagcagcaacgtcagcgttgcggcaacaagcgttgctaaagtatcgagatgaaacatagttactcctttgtatccgcatcactctttcatactcgtcatacttcatcgcgcagtggcaacttcatgaactatgacgggtatcgagttatgctttcctgggtcaaattctcagctgttaatgaacaaatggcatggattttaagcagaaaaataccaaaagttatataaaaaagtgcatttatctcatttaaatatttagatgaggatgtggcaaacgtttgcttttctctttcggtcagctaaaatgcccgctttgctaccacgggattgttttcgatgtctgtttccaccctcgagtcagaaaatgcgcaaccggttgcgcagactcaaaacagcgaactgatttaccgtcttgaagatcgtccgccgcttcctcaaaccctgtttgccgcctgtcagcatctgctggcgatgttcgttgcggtgatcacgccagcgctattaatctgccaggcgctgggtttaccggcacaagacacgcaacacattattagtatgtcgctgtttgcctccggtgtggcatcgattattcaaattaaggcctggggtccggttggctccgggctgttgtctattcagggcaccagcttcaactttgttgccccgctgattatgggcggtaccgcgctgaaaaccggtggtgctgatgttcctaccatgatggcggctttgttcggcacgttgatgctggcaagttgcaccgagatggtgatctcccgcgttctgcatctggcgcgccgcattattacgccgctggtttctggcgttgtggtgatgattatcggcctgtcgctaattcaggttgggttaacgtccattggcggcggttacgcagccatgagcgataacaccttcggcgcaccgaaaaatctgctgctggcaggcgtggtcttagccttaattatcctgcttaaccgtcaacgtaacccttacttacgcgtggcctcactggtgattgcgatggcggccggatatgcgctggcgtggtttatgggcatgttgccagaaagcaacgaaccgatgacgcaagaactgattatggtgccaacgccgctctattacggtcttggcattgaatggagtctgctgctgccgctgatgctggtctttatgatcacttcgctggaaaccattggcgatatcacggcgacctctgacgtttccgaacagccagtgtccggtccgctgtacatgaaacgcctgaaaggcggcgtgctggcaaacggcctgaactcgtttgtttcggcggtgtttaacaccttcccgaactcctgcttcgggcaaaacaacggagtgatccagttgactggtgttgccagccgctatgtcggttttgtcgtcgcgctgatgttgatcgtgctgggtctgttcccggcagtgagcggttttgtacaacacattccagaaccggttctgggcggcgcaacgcttgtaatgtttggcaccatcgccgcctccggtgtgcgtatcgtttctcgtgagccgctgaaccgtcgggcgattctgattatcgcgctgtcgctggcggttggtctgggcgtgtctcagcagccgctgattttgcagtttgcccctgaatggctgaaaaacctgctctcctccgggatcgccgcgggcggtattactgccatcgtgctgaatctgattttcccaccagaaaaacagtaattcactggcggcggtaagataattaccgccgcagtctcacctctttcaccattcccgccttgaggattgcgcgtaaatcgtgcataactcccttatgtgcatttcacgggatggaagaccatgaaatttattgggaagctgcttctctacattctcatcgctctgttagtggtgatcgctggcctctattttcttctgcaaacccgctggggagcagaacatatcagcgcatgggtttccgagaatagcgactatcatctggccttcggggcgatggttcaccgtttttccgcgccatctcatatcgtgctggagaacgtcacgtttggtcgtgatggtcagcccgcgaccctggtggcaaaaagtgtcgacattgcgctaagcagtcggcaactgaccgaaccacgccatgtcgataccatcctgctggaaaacgggacgctgaatctcaccgaccagaccgcgccgctaccgttcaaagccgatcgtctgcaactgcgtgatatggcgtttaatagcccgaatagcgaatggaaactgagcgcgcagcgggtaaatggcggcgtggttccgtggtcaccagaagccggtaaagtgctgggtacgaaggcgcagattcagtttagtgccggatcgctttcgctcaatgatgttcctgccaccaatgtactgattgaaggcagtattgataacgatcgcgttacgctgactaacctgggtgccgacatcgcccgcgggacattaaccggaaacgcgcagcgtaacgccgacggcagctggcaagtggaaaatctgcgcatggcggatatccgtctacaaagcgaaaaatcgctaaccgacttctttgcgccattacgctctgtcccgtcgttgcagattggtcgcctggaagtgatcgatgctcgtttgcaaggtccggactgggcggtgaccgacctcgatctcagcttgcgcaacatgaccttcagtaaagatgactggcagacacaagaaggcaaactgtcgatgaacgctagcgagttcatttatggttcgctgcatttatttgacccgattataaacgcggaattttccccgcagggcgtagcgctgcgccagttcaccagccgctgggaagggggtatggtcagaacgtcagggaactggctgcgtgacgggaaaacgttgatccttgatgatgcggcaattgccgggctggaatataccttgccgaaaaactggcaacagttgtggatggaaacgacacccggttggttaaacagcctgcaactgaagagatttagcgccagccgcaatctgatcattgatatcgaccctgacttcccgtggcagctcaccacgctcgatggttacggtgccaacctgacgctggttaccgatcataaatggggcgtctggagtggctcggcgaatctgaatgccgccgccgcgacattcaatcgtgttgatgttcgtcgcccgtcgctggcgctgaccgccaacagcagcacggtgaatatcagcgaactgagtgcatttactgaaaaaggcattctggaagccactgccagtgtttcacaaacgccacaacgtcagacccatatcagcctgaatggacgcggtgtgccggtgaatattttgcaacaatggggatggcctgaattaccgttgactggcgacggcaatattcagcttaccgccagtggcgatattcaggccaatgtcccgctgaaacctacggttagcgggcaactccatgccgtgaacgccgcaaagcagcaagtgactcaaaccatgaatgcgggcgtcgtttccagtagcgaagttacatcgacagagccggtgcagtaaaaatcaatctcgccgggtacgactcagacgtacccggcattccatcaatagattacaacgtaantgtcagcgcattcccttgaggcgtcaccaccagcccctgctcactttcagcctgcgaaccaccttgcagaccatttactttcacaatattgcgcaagcacagtgtccagttcttcgcctcgcccgcaccagtcacagtaatcgtgttgccagtacgcgccgctttcagggtgaaaagaacggaaccgtcagcagcgggcacttcacagatggcttcatgcccgtcttgtagattaaagagctggaatgccgtgccttcgtgccacgcgtaatcgggacgttgctcgttgttgcccagcgccagtagggtgttatcacgcacataaacgggcagactcaggaagctgtgctgctgtttatgccagcgactaccatcgagttcatcgttgtgccacagatgtgtccagcgaccttccggcaagtagaactgcacatcgcccgcttcactgaacaccggagcaaccatcacgttgtcgcctaacatgtattgacggtcaaggtaatcacaagccggatcgtccgggaactccatcatcatggcccgcatcatcggcgtaccccgcgcgttcgcacgagcagcttcacgatacagatacggcatcatgcggcatttcagttgcgtgaagaagcgcaccacatcacaggactcatcatcgtaggcccacggcacacgataagatttgctgccatgtaaacggctatggctggagagcaaaccaaacgcgcaccagcgtttgtaaacgtgcgccggagcggtattctcaaagccgccgatatcgtggctccagaaaccaaaacctgaaaggccaatagacaaaccaccgcgcaggctttccgccattgattcgtagttagcgtaacagtcaccaccccagtgtaccgggaatttctgcgcaccaacggaggccgagcgagcaaacaagacggcttcttcctcgccaacggtgtccttgagcacgttccacaccagttcgttgtagatgtacgcataatggttatgcattttctgcggatcggaaccgtcaaaccactgaacatcgattggaatacgttcgccaaagtcggtcttaaagcaatcaacgcccatcgcgaccagacctttcagtttgtcggcgtaccatttgcaggcatccggattggtaaagtcataaatcgccagacctggctgccatttatcccactgccataacgaaccgtccgggcgtttgagtaaatagcctttctcttgtaactctttaaagacaggggatttttgcccgatataggggttaatccagacgcagatttttagccctttcgctttcaggcggcggatcatcccttccgggtccgggaaagtcagcgggtcccactcaaaatcgcaccactggaaggctttcatccagaaacagtcaaagtgaaaaacatgcagtggcagattgcgtcccgccataccatcgataaagctgtttaccgtcgcttcgtcgtagttggtggtaaatgaagtggttagccacaggccgaaggaccacgcgggcggcagcgccggacgaccagtaaaacgggtataacgatcaagtaccgctttcggcgtcgggccgtcgataacaaagtattcgagatattcactctcaacgctgaactgcactttggagactttctccgatcccacttcaaaagagacgcattgaggatgattgaccagtaccccatagccacggttagtcatatagaacgggatatttttatacgcctgttcagtacttgtgccgccgtcccggttccaggtctctaccgtctggccattgcgcaccagggcagtaaagcgctctcccagaccgtaaactgtttcgccaacgccaagatccagccgctcaaacatataatttcgttgattattcgtgtcctgcacgtagccattatttttcacctgactaccggtaatacgttcgccgttgcgcagaaaatccagtgaccagaactcacctttgctgacacgcgcgcttaagttgccacttttaaactcagcgtaacgttctgtgttttcgattgtgaccttcacgtcctgcaaaatattgagcggataatgaggaccgttattcagcgccccctgaaaatgctcaatccgtacaccgacaataccttcctgtggggagaaaaagcgcagcgtaaataaaggcgtatcaagctgccaggttcgttcacgcacatcacggggggcagcatagaccaccatttcattaccctgctgttcaacctcgaacacctgaagcgggtgaatcaaattgaggccaggttgaatcaaccagtttccgtcgctaattttcattgccgttccttagttctgcacttcttgagaggtgaattgttgctggcaacggcgtttgccctgggccagctgttccataacggttttcagattgtgcgtcgtgagtgagtagtagcgtttagcgataatcgcgctcagcaaataacagatcgccggaacaatcgtgaatagcgcaataatgatgctaatcgtggcgctgttctgcgctttttctgccgcatcatatccgccataagccagcatccagccgataagagcgccgccgaaggccaaccccagtttgagcacaaacagcgtgccagcaaaactgatcccggtcaggcgtttaccattgcaccactcgccgtagtcgacggtatcggacatcattacccactggataggtgtcaccagttgatgcaatacaccaatcacgaagatgaagacaaacatagtgatgctggcctgcataggaacaaagaacatcgcgaggctaatcactgccagcagggcgttcgtccaccagaagatagtgactttacatttccagtcggtcagcggttttgccagtgcggaaccaatcaggttacccacgcaataagtggtgagaaaagcgacaaacacttccggcgtacccaaaatccatgtgacgtaatacatcatcgctccaccgcggacgcacaccgccaggatattgaaaatggttagtaaaccgacaatccgccactggtcgttttgccagatatcacgtaaatcttcccgcatagacgtcgttgtaggtggtgcttcaacgcgttctttagtggtgaagaaacagaatgccagcatcatgaatgccaccacggaaaggaccgcgataccgccctggaaaccgagtggtttattatcaccgccaattaaattaaccagtggcatcatcagaacagtagagagcatgcctcccgcggtcgccagcacaaaacgccaggattgcagcgagatacgctgagtcgggtcattggtgattacaccacccaatgcgcagtaagggatattgacgacggtataaagtaaggtaagtagggtgtaagtaattgctgcatagatcattttgccgttcatactgagatctggcgtgctataggccagtacacagacgatcccaaatggcagtgcgccacacagtacccacggacgaaatttaccccagcgagagcgcgttcgatcggccaacaaccccatgcaaggatcggaaatcgcatccagtgcacgagcgaccaaaaacatggttccgacaaatccggcaggtatgccaaaattatcggtataaaagaacatcatatataacattacgttatcgaaaataatgtggctggcggcgtctcccatgccataaccaattttctctttaacggacaacacttcactcttcatctgcttttccttgatgctataggggtgctgagaccgataacgcattttgtaaaccatccctgtgagagcgaatattccgatatctggttattaatttatgattcttgttttatgtgatcgtggtagcgttaattccgctcatatatcattgtaaaatatgggttttatatgaattataatgctttcgtgataatacgctgcgtgtattaggcggaaaaaactgatctgggggatgtagaaactcaaggaagtagctataatgcgccccgcctccatgtagcaatcgaggcgcggaagatcgtcgtctccggtgaggcggctggacttcaaatccagttggggccgccagcggtcccgggcaggttcgactcctgtgatcttccgccagtttgcctctcctgaactctcccgacatcaacaaagccccttataatcccttatatatcaggttttctttgtatcctgaggtcaaacgactttaacccatatcaagttgtttgtgggggtgcattgggggtatcaggttggttactggcggaaattcccccaggaggatggattcatcaaaagctggaggatgtcatggcgctaaccgatgttaaagtgaaaaccgcgaagccaaaagaaaggccctataagctggctgatggcggaggtatgtatctgctgattaacgctaatggttccaaatactggcgtatgaagtaccgcttcgccggtaaagaaaagatgctgtctattggcgtataccccgatgtaacgcttgccgacgcacgtgagaaacgcagtgaagccaggaaaatacttgcggctggtggcgatccgggtgaggcaaaaaaagaagaaaaaatagcgctgcaaatgagtttgaaaaacnctttcgaggccgttgctcgcgagtggcatcagacgaaagccgatcgctggtcactgcgctaccgcgatgaaataatcgacacctttgagaaagatatcttcccctacatcggcaagcgacctattgccgaaatcaagccgatggagctattggaagcactacgtaagatggagaaacgtggagcactggagaaaatgcgcaaggtccgccaacgttgtggtgaggtgtttcgctatgcaattgttactggtcgagccgactataaccctgctcccgatcttgccagtgctttagctacaccgaaaaaagtacattttccctttcttactgccaatgaacttccccacttccttactgatctggcgggttataccggaagtatcatcactaagacagctactcagatcattatgttaaccggtgtacgaacgcaagagttgcgtttcgcgcattgggaggatattgattttgaggcaaaattatgggagatcccggcagaagtaatgaagatgaaacggcctcatattgtgccgccctctgagcaggttattgcgctatttaagcaacttgaaccaatctcaaaacatcatcctctggtctttatcggtaggaacgatcctcgcaagccaattagtaaggagagcattaaccaggtcattgaattgctggggtataagggaagactcacagggcacggtttcaggcataccatgagcacaattctgcacgaacaaggctttaattctgcctggattgaaatgcagttggctcatgtggataaaaactccatcaggggtacctataaccacgcccagtatctcgatggtcgccgtgaaatgatgcaatggtacgctgactacattgattcactttctgagctggcctgatgaatgaaagttcggtgacacaaaaataatgaataaccatccagccccaacaggcggatggttgtagtggcacagtaaatttggccacctgattaaaggtgatatcctcaccacaacacaaaacaggtgacttaatgaacaagaaaaccaaacgtactttcacccctgaattcaggctggaatgtgcacagctaattgttgataagggctactcatatcgacaagccagtgaagcgatgaatgtcggttctaccacgcttgagagttgggtgcgccagctcaggcgagagcgtcaggggattgcgccctctgccacacctattactccagaccagcaacgtatccgcgaactggaaaagcaggttcgccgcctggaggaacacaatacgatattaaaaaaggctactaccgcgctcttgatgtccgactcgctgaacggttcacgatagttgccagactgagtgacagccactcagttgtcagcctctgttctgctctggaaatacaccgcagcagttaccagtactggcgaaaacgacgcgatacggttaatccggcgcgagtcaggttgtgcagcgaaatacgccgggcgtggaaccaaagtaggggctctgcgggggcgcgcacgctggctgaaatgctgacccaaaacggcgtcccgatgagccgttaccgtgccgggcgtctgatgaaatatctgaacctgagcagttgtcagcccggaaaacatcagtacaaaaatgctcgtcaggaacatacctgcctgccgaatctgcttgagcgccagttcgctgtgcccgagccagatagggtatggtgcggagatattacgtatatctgggcaggaaatcgctggtgctatctggcggtcgtcatggatctttttgcccgcagggttatcggctggagcctgtcagcgaatgccgatactgccctgataagcagtgccctgcggatggcgtatgaggtgcgtggtcagccgcgggacgtcatgttccatagcgaccagggaagtcaatatacaggactgaaatatcaacaacttctctggcgttacaggataaagcaaagtgtcagccgacggggaaactgctgggataacagtccaatggaacgcttcttccgcagtctgaaaacagaatgggtgccaaccgatggctacacaggcaaagacgtggcccggcagcaaatcagcagttatattctgaattattacaatagcgtcaggcctcaccattataacggagggctgacgccggaagagtcagagaacagatatcatttttactgtaaaaccgtggccagtattacttgaccactacactggaactcatgctcaccagcggtgagctgaatccccgccatcagcataccgtcacgctgtatgcaaaagggctgacctgcaaagccgataccctcngcagtnntggttacgtttatctggctgtttatccgacgcccgaaangaa

SEQ ID NO: 1570 - DNA, 47 bp, Escherichia coli
  Strain O55:H7
  modified_base (2)..(5): a, c, g or t
tnnnnagaatagccttctgctacggcctggtgttttcaccacgccac

SEQ ID NO: 1571 - DNA, 3 bp, Escherichia coli
  Strain O55:H7
att

SEQ ID NO: 1572 - DNA, 35 bp, Escherichia coli
  Strain O55:H7
ctgcatatcaggaaaatcttcagtatgaaaacatt

SEQ ID NO: 1573 - DNA, 107 bp, Escherichia coli
  Strain O55:H7
  modified_base (24)..(24): a, c, g or t
ggcctcacactgaatgacacaccntttgccgatgaacgtgtgattgagcagcatattgaggcaggcatttcactgtgtgatgcggtgaactttctcgtggaaaaata

SEQ ID NO: 1574 - DNA, 2827 bp, Escherichia coli
  Strain O55:H7
  modified_base (1004)..(1004): a, c, g or t
  modified_base (1382)..(1382): a, c, g or t
  modified_base (1469)..(1469): a, c, g or t
  modified_base (1851)..(1852): a, c, g or t
  modified_base (1974)..(1975): a, c, g or t
ccagccgggattcagcgcctgtacccgctctcagttaataaacagcatcgatatcctcctggctcgcagggcgaccggcctgatgacccgcgacaattacagaacggtaaataacattaccctgggtaagcatccggaggcgaaatgatgaaactggccctgacactggaagccgacagcgttaacgtacaggcactgaatatggggcgaattgtcgttgacattgatggtgttaatctcgctgaactgattaacatggtctgcgataacggctactcccttcgtgttgttgatgaatctgaccggacctcagcagactgcacgccaccatttactgcccttaccggcatacgctgcagtaccgcacatatcacggaaacggacaacgcctggctgtactcgctgtcacaccagaccagtgacttcggtgaatcagaatggattcattttaccggtaacggctatctgttgcgtaccgatgcgtggtcgtacccggttctgcggcttaaacgcctgggtctgtcaaaaacgttccgtcgtctggtcgtcacactcatccggcgttatggtgtcagtctcattcatctggatgccagtgccggatgtctgccaggtttacccacttttaattggtaactaggaacaacatgacatcattaaccccggaagcagcactggatattctgattgcgtggctgcaggacaatatcgacagcgaatccggaattatcttcgacaacgatgaggataaaacggattcggcagcattgttgccctgtatcgaacaggtcagggaagatgtccgtaccctgcgccaactgcagcttctgcaacagaaccggtgagtctcactcaccatacttcattccactgacgccagcctgaacagggctggcgttttcgtttataaaccaaaaggaaaaccgataatgtcaggcatcataatctcccgtccggaagtggacaccgggcatacggacgttatctgctccaccagtatccgncacgttgtgacggtacggaatgcagcactgcaacaaaccgaaacgcttatccggcaactggcagaaatctcagtcctgacagcagcagacattggcggcaaaaccgccctggaccgggcgatgaaacaggattttcactgcggctgctggctgatggagaaacctgaaaccgcaatgaaagccatcacccgcaacctcgactgcgaaatctggcgtgacctgatgcaacgctccgggatgctgagtctgatggatgcacagggctaggatacatggtaccgctcactggagtacgataatattccggaaatcagcgaggcgaatatcatgaatgcattcaaacaactgcaccagagtaaggatgaagtgtttgagcgnggggtgatcaacgtcttcagagggccgaacggaattacaaaaccaattccccctgtaaattcggcagtaaaattatcgtcaacaacntggtgagatggtacagatggagatttcatcttatcagtggaatgcaggcagatcgcttagctgacctggaaagaatgttgcatctgctcagcggtaaaccgctccccaacaaccgagggaatatcaccattaatctggatgaccacctacagtccgttcagggtaaagagcgctatgaagacaagtaaatactttaagaagggcccgcacacatcacattcagaaagccagagctggttgacaggcttaatgatattattgccagacactacctaggaatgttaccttcacaaaaatctctaagaattgattcaattgtgtattttagcctcattccctcatgtaaagtcatttgggggttattatgggggtcaatcatttnnacgcattaatcatttaaaatcaatgcattaataatcatattcgactcctgtgatctccgccaaacttcctcttctgaactctcccgacgtcaacaaaaccccttttaatcccttatatatgnngctttctttgtgtacaggggtcaaccgactcaacctgtatcaagttgcttttgaggatactttagggggtattatttcctcttgaaatattagcaccccataatgggaaaaaggtaatacataacaatggtttttaacagtatctttgttatacaagggggcattgaggatatcaggaaaaatctcaaaatcggtacggacaggaaactacgtgggcagcaaaaacgtatggtaacaccgggaaatgcaacgcccaccagtcgggctaatccaccactccaatcgtggttcgcagtactgcacacacgattaccgggctatacaggagcggtttggtctgaaaacatccatgccgcgtaaaggtaaccgttacgacaacacctcaatgaaaaacttatagtaaacgctgaagaatgaaactatcgttttaataaccgggatgaagccatctaagtaatacggaaatacattgagattttctacaaccatcagcgccgccactcccgtctggggaatatctccctggtagccttcaggaaaaatataaccagataactgcgtaaaaaaagaacaaatggtggtgtccgctattgccagtatacctgagtttactgcctttcagattatcacaatcaatagcgaacagacttttgagctctgtgcgcttttaacaaaacgtccctttctccactttcaccgtataataatacattatttattacccctccaataaaaaccgatattactaatcacatttattaccacacaatttgatatcggtttttattagttggttaccctttcttcgattgctcataggcagctaaatgatcttttaatgcctgtgcaatg

SEQ ID NO: 1575 - DNA, 21 bp, Escherichia coli
  Strain O55:H7
  modified_base (5)..(6): a, c, g or t
  modified_base (14)..(16): a, c, g or t
aaacnnaaagcctnnngacct

SEQ ID NO: 1576 - DNA, 84 bp, Escherichia coli
  Strain O55:H7
  modified_base (42)..(42): a, c, g or t
  modified_base (44)..(45): a, c, g or t
  modified_base (76)..(77): a, c, g or t
  modified_base (81)..(83): a, c, g or t
ggcagccaagtgctcttttaatgcctgtgcaatgggcggtananntcgggatgccccggatgcctgtccacttgtnngtgnnng

SEQ ID NO: 1577 - DNA, 22 bp, Escherichia coli
  Strain O55:H7
  modified_base (15)..(16): a, c, g or t
  modified_base (18)..(21): a, c, g or t
ggcgggcttaaaacnnannnnc

SEQ ID NO: 1578 - DNA, 9569 bp, Escherichia coli
  Strain O55:H7
  modified_base (131)..(132): a, c, g or t
  modified_base (162)..(163): a, c, g or t
  modified_base (170)..(172): a, c, g or t
  modified_base (174)..(175): a, c, g or t
  modified_base (724)..(724): a, c, g or t
  modified_base (2724)..(2725): a, c, g or t
  modified_base (4337)..(4337): a, c, g or t
  modified_base (5142)..(5145): a, c, g or t
  modified_base (5157)..(5157): a, c, g or t
  modified_base (6013)..(6013): a, c, g or t
  modified_base (6778)..(6778): a, c, g or t
  modified_base (7119)..(7119): a, c, g or t
  modified_base (9567)..(9568): a, c, g or t
gcctgtgcaatgggcggtaaaggtcgggatgccccggatgcctgtccacttgtcggtggcggcggtgcctgacgggcgggcttaaaacctaaagcctcaggacctttcgatttttcataggcagccaagtnntcttttaatgcctgtgcaatgggcggtaanngtcgggnnncnncggatgcctgtccacttgtcggtggcggcggtgccggacgagagggagtaaatgaagtcacctggctgctcacattaaaaatcgttctcgcattaacattcgacgagcctggagaaaaaggggaatgaactttcaccggagtaagacgcacggcctgaggggctacagaaaatccagttccccccgcagagctcactcgacttgcgatacctacaagctgccgccctagtgtagaagcagcgttactaattccattaagcataatttatgcctctttatatctaagcttggctaactctcatatatatcaaaacgaataataaaatgatttttaaatcaatataaattaaaatcctcgtacccagccactaccattctcatggaccaaactgtacaataactgactcgtctcatcatccatacagtcctccaaagcctttaccgcatcattttttctatttaatccaaataagataataaattctaaatgtgcgatatcttttttatcaggtataatttgtgggaatacattcaggatagcttccgcanatttgggaagcttatggtttgccgcagctacagccgcccacaccagtatcttattagcagaaatatcattaaccattaaaattaaaaactacggttagaaatggttgagaccagatcttttatcgttttcaacattccactttctacgttaacataagcagaatattgctgaaccgcaaactgcaactctaacattttttcagggtcattaaccaaatcggtgctattaagtaactctggcacagaatcgctcagcgttttacctacttcacccatttgttgagtaatttcagataaattcattaaatttccctcagaagttaataaaataaaaacttttaactatttacgttcattacgaaccaaattccgtcttctgtttcttgctgcacggcaccctttctgatgaagtaattaaacaactcttcgcgcttttgacgttctgaatctgaaccaatcttagatttcatcgcgctgattttcttaatacccgaaaaatggtgatacaactcttcgagcaaatgagtcagcgataaaacagggccgttaagccctgtttggttacgtgcttcaaaagagcacaaaatcagttcttgttcatccagtctgtacgctaatgaaaaaaaaggtgtctcaatccgccatccgataaaaaaggcactgccacaaagaaactccttctgtattgtgtaccctttttgttcaagatagtaattaaacacttcatcattaaacgtatcgaccatgatcaattacccagctaagcgacccgattgccccatacgattctggacctcaaggagatcgcggacagcggacgttatatcacgcagacgagtcgtgatatcatcctgcgttctgcgaacgtcttgtttatacagctccagattcccctgctggaagttttccagcgacttcgcacgttgttcattaacctcatgagtcgatttgacggactcagatattgttgttggcaacgttttcgtaccttcagcaagactggtcacggcaacaaatgctgtggtattggtcagtttatctacggaattcaacaacttattgattctgcttgtcttctcggcggcgtctgcaagatcttcagcaaagtcagaggctttcgcaacatcatctgcaacgccagatgcacggctggctgctttcgttgttgtggccatcgctttctgcatcgcactggatgcctcctctgcgacatcagcaacactttccgtagccttgaccagagctttatttgcaacctcagaagccgcaccagcagcctttgaagatgcagagcttgctttttcagcaatctcaccagcccctttagccgcgttgttcattgctgcaaaagaacctaagatccccaatgctgatgaaataatcccgccaaccaaagcagcggttgccgcggcttttttttcctcaatagctttattctggctctcaaaaacggcctgctgaatctgatagctttgcgccaattgtttttgttggtaatcctgcaatagagtcaccatcttgccgaggagtttttgaatttccagcatcagcttacaaatatcaaccttaccatcagtaagcagagatgaatcaattgataaagcagatgcggcaactgcactggaagcgccggtcgtactctccgaagcggaattaaccatcgttacttgagtattatcaatagtattcataataaaattctctttaataattaaattcggccactaacaatacgactatttacccgtgctgaatcggacatcagttgagaaacactttgtaaatagctcgcctgattttgtaactcgcttgccgctttatccagctcgagcttcgcactctcacctaagctttcactctgtcgagttaagttttgcaccgcgaaagcagctaactgagacaacatttggagttgcgcagcctcattattcaacgcagttgtcccggcagaacgaataccgttcgtaacgccctcagccactgtcgagatttttgcaaanncgtttttaaccagcgcttctgccgccttctcaacgacttttacaacgcttgagccaattttgttagcaacattaccaaatttagataacagtgaagacaccccgccaacgccggctgtcagaatgcttgcggccatagatattccgccaaagacctgtgctgcagtctttaatccctgaggggcattttcccccattacatcgactgccgtttgcagtgccattgctgttgcaccaatggcaacaacagcccagagtgctgggttaaaaacagcggcaacggctgttaatgcgacgcccaaccaaccaaagacctggccaacaattttacttttttgtgatttctcttcggctttctgttgttcttcgagctgttttttatactcctgcgttttattctccagcgctttagtttgcccatccatataaatctcgttagagtttttcagactcgagactttctgcgcggaagtatccagggataacagagtgaccatcatcatcatttgctgagggtcaacggtattcacctgagagagatagggatagcttgtgcgctgtggctctgcctcctcagtgcgacttgtaacctcaccactaataccaccaaacaatttactaaggacatcctcagcagcagagggcgtcactaatgagtgacctgccggcggcgtcggtaaagggctactttctgtccagcctgctgacgagttcatggatttaaccagttgtaaatccagcgataaacccgtttcagattgagtaataccagaagtacccgaggcggtattaaccccagacgttacagacagggtatcgttatttacgttaagcatagttatctccggttatttaccaagggatattgctgaaatagttctatattgtagagattgcacatcagaacgtgcactcgttaagagatttaatgtattcgacatttgctgaatttcgagctggctattattcactaccgttgtcaggttattcgctttagctgaaatagccgccttcactgtttgcagatcaccagcgcttaaatcaccactaagatcactaataccagttacacttatgtcattacgtggatcgtttatatagtcaatcacgtcttgaggaagtttggctttcgcattcttatcagtgctactctgaacatcagcaattttggcatccacaagattagccatcttttgtgccgtggttgacgctttagatgcctcattcatatcagcaaactttgcaatcgacagattactttgtgcctgatacatataagaaaacatgagaatcgcagcctgaaaaacaccgagttcctcaaatagcttaaccacctcatccttcgacatattacctaagtcatagatcgtcgatgtcgaagaactcgcactcacattaacaacggatgttgcatttgatgtatccatctatatacctcttgataatttttctcaggaaaacaaaaaaattattgagtaattaatatcaaataatttcctccttatagtcgataactttaccaatcattaataatgcattctctctctgctcactatcaataaagcaagcatctggtaatgatgtaaaaaagtctttcaataaatgaaaataanaaatatgtttatcttcgacaatcgatacccgagaaggactctccagcaaccagtcttctgttagccagacatgttcaataatcgataacacttcatttaaaatgatatctttatctttcttaatagagatcgaaataatatctgcatagttatcaagtgataaaaaaatgattaccctgcataaatcactaataattgaagatgtctttactttgtcttcaaaagaagacatataagagagatcgaacgacagcgccctaataatgacttttaagtgcttctcacgctcgggaagatccttaatctccataaaccagtcaagtaaagaggcgccattttcagaatcctcatccttagccttttcataaagcttcttgatcttctggataccttcctgatttaactcacccacccctaaccaggaaagcagagccagctcccaatcatcttcgcctaataaatctaataataacctggcatatttcttttttaattcaatcttaacaaacttagattgcaataaagaagatattagcgcaacaatttccccctttggcatgttgccaaacatcgccaaagtaggatcgtgttgttccagcagcccgctgttttttaatgatagttcttttattttatcactatcggtaagagtaagcagctcttgcatatcattgagcagcttctcgattgtcgagccttcctcttctttccttgcgctacctttgcgatatcccaggcttagcccttcaatcgtttcagaaagcgatgaactagtaatcattgctaattcattttgcaaatttannnntggcgaagaaanattagaagaatttttttgcgttaattgctgagattctaattcaaaatctaatgaattagaattaaaaacagatgcggggttttgattaaattcaataccattagccattggaaactcacgtaatcattaattatgaatattccattaaatagtactgtacaacagcttcctttctactctattcttagacgatgtaagttcaccatattttttctcattgttcaaccaccaggatgaataaaatttaaaaatgttatcctcatataaaataaaacttctcaatggtgcgatgcgtaatcgggaattacaacttccgatgggaaacctaacgctaggtacggaagataacgatattgtttactttccccttgaacaaggcctcaatcagtttttacttgatatacgtgaggaaggtgttttccttttatctccggttgaattttggattgatgggcaacccacgccctatgaagcagataaaccattacctgtcggaaaggttattgatatagcgggatgttgcttcatcattggtgatattgaccattccttgccattgtctgatgtgccagaaaggttctctgccaaaagtcgacgcaaaaaacgccttatcctggcgagcgtgattggtgctacttttgcgttgtctggtgccatcggcagttacgttttgctttccccaaaagctgaacccccaacgtttaccagagctgatgtatatcagcagctaaaagaaaacaaacttcatgcaatcactctggtatggcatgggaaaaatatcgcgctttatgggcgttgcgaatcaaccacggatttaactccattttttaattacctaaaagaaaaaaatattttntattacaataatatcatttgcaataaccaaatcatatccgcaattaatgatgtcttaacggaatacggttacaaagatatcattattacaaaaggtaataagcctggattctttctgttatcgggatacattcccccttcacccaaatggagcgaggttgaaaatctgttactgaatacgccaggagttgcaggatgggaaatacacaacaacagtaacaataaaatcaatgaactggcatcagagtttaaaaagaataaactaataaactatgtcaatattttcaaaaagaatgatgtcatcattgttgcgggggaagtttctcaacagaatgagagtaagatccttgccattataaatgcaatgaacaaaaatagtaacgccaagatactctttcagaacattcagccgtacatttcagcagatattttccccggaaaaatactcagaatcagcggtacgatgaagaatccaacaattgctcttgataatggcaccagcctggggattggtagcattctgaaaggaggctatgtcatagacgcgattgatcctaaagatggtatcaacatctcccgcccagacgaatatatacatattccactgtcgtattaatttcttatcctcttccccctcttcggagggttttttattgtgtggatgttgtgagcatagttgttgcttgatgtgattcagctttggtatcagcgtggttggatcaacctacatgagaaaacgtgaatgtgtctctttgaaagagacctnttaagcagataaaaagaccagtagtagatttgattataagaggttatttcttaagaagaaataattatgccccgactaaaacaatacatattttagccggggtggttatggaattattctacacaaaccgcatagacatttggagtattaacattaaccctaggaagagggttttgtgttattaggttataagtgcttgatactccagaactctgctcactagatgtctgtttaatccaagcagttattgagttcatagaactataatggctatatttatttgcagccccccatgagtcataaatatctgacaataccgtctgtgtggatggtaataaatntttgcaaatggacatagcatcagcataataggcttgcttatccacttttatcatatacgacggtgcttttatagtgtaacttactgtttgcttatcaccagatgtggctttaattacgacactgcctttaccattcaaagtgactttccctgatgcatcgacagtcgcgatactggtattttctgaataccatgaatatgtaccatcaccaccgcttgctttcagtttaaactgaccatattgcagccaaatattaggcaactcgcctctgacattgttaccaataatatcaaccttgttgtcaattttcagttcatcaaaaaaagtgacctcagtcgctttaacctcagccccatcactgactgtcgcactaacagtcgctttaccggcggaactggaagttagtgttatcgtcgcacgaccatcatttcccgtggttgcttgcgtttgagacttaccgttgaacatcccaaagtttgttgagaatgtaacggattgattattaactggctgaccgtttttcataacttttacagtatatttaatagcatccttaccatttgctactgcagttgtcttatcagccttaatctcagtaatgctggccttggtttgatcaaaaaatataaccgcactggcattaagtgctgaagtcatctccgcggttttagcagacacgacgacctgtcctggcgtactcgacttcaacgttacggttgccttaccgttagcatccgttttggcactatttgccccaagagttgcagttcctgaaacaatattaaatgaaacagggacattagcctgagctaccccattctttttcaccgtcgcggtataagtaatggtatcggcgttatccgctttagccgaagtcttatccgccgtaaagtccgttaccccaacctggtcgacaacttgaccattcgacagaacggtaatagtaagctgtacattgttagagctattgccattacggtcataggcgcgagccgtcactttataaatattgctgccaccttgcacataagcaggcaaaatagcctggtagtcttgtgcgctttggcttccgctatgctgaatctgaccgccctgactgcgtaatgcactatcatcccagacgatacgatccagaccgtatttgctcttaacgatcaactgaatcttctgcgtactgtgttcagtaccattaatatcatgcggaatattcagagaaagaatatcctgcttcttgtactccagaataatattgttattacgctgaaccagatcgtaacggctgcctgataatgttcttaactcgttaacatactgtggttcaatttgctgagaccacgatttatcaaactgataacggaactgcattgagtaaaggagatcattttcattacccgtaccatgacggtaatcgatccccatcgtcaccagaggaatcggagtatagtttacaccaacggtcgccgcaccaggattcgactgcagcttatcagaattaaacaaagcaacattatcaccataatactgctcatatatcagcttggcgcctaatgccggatatgacggtagatagccattaaaacggatatcgaagccatttgctgggcgctcatcatagtctttcttattgtatgactcatgccagccgctcatgcggaaatagccgttaacgctacttttgaaatagtctcgccagtattcgccaccaatacctaaacgggtattatcaccagaaaaatcctgatcaatgaagacgttatagcccaacatgtttgcaggaaggaaaaaacgctgacccgcacctaaatttgccgtaaagcgggagtcaatgtaacgcgctccgacctgaccaaatgccagcattttttcggaatcatagaacggtaataagaagtccagtgaactaccgtcaaagttattaccactctgcagattaacctctgccgttccataatgttgtaaccaggcctgcaactgtgacgaagcctggttaccagcgataccaagagcggtatctttcgcgtaatcgccgttcagagatcgcgactgaagctggctaccgagactcgccgcctgttgtgccgcataatttaatgccttgtcatcggtcatgttgcttttggtcacgtccggggacattttagtcagtttattcgtgtgaccagcaacaccacctgcagcaacaagaggtgccgaacctaaaagtggtagtgcactgtattcaaagggaagttttttgagtggcaaaatgatctgctgaccaggcgcggccttcatcatttcgctttcagaactgtataaatgcttattcaacgaccaaatcgtcgataaattaatatcttgcgatttagaaagatcggcaacagtttcaccagttttcaacgtataaaaaaggcgattctgatagctatcatgagttaacagttttgaatccgaacccaatttaaaatnnt

SEQ ID NO: 1579 - DNA, 5436 bp, Escherichia coli
  Strain O55:H7
  modified_base (2)..(2): a, c, g or t
  modified_base (613)..(616): a, c, g or t
  modified_base (618)..(619): a, c, g or t
  modified_base (624)..(627): a, c, g or t
  modified_base (2659)..(2662): a, c, g or t
  modified_base (2793)..(2794): a, c, g or t
  modified_base (2796)..(2797): a, c, g or t
cntttgcaaatgaattctgattaacataaaaaaacaatcctaaaccagcactaagcataatcaatgttttttttagcttatgcttgtgccgggtccgggtataacaaccatgagtaatcatgttatggctccaccacaatgagttagaatgagaaataaattatattaatagatcggattttatcttccggcgtaataatgtttattgtcgcttgaactgatttcctctattttcatatgttcgttttctaatgttattccctgattatgtaataccaaatacaggttttccattgacttaacaacgacttctatttcattctcgagtttttcaggggtagcatcatcgagagggaaacgtaacgctaacaacagcgattgtgctccagcctcatagcacagatatggcccaccattctctgcaaaccataagtttgcattcaaaatctcaagagcgaagttagagttatctgtcgggaatttcccacagacaccataaatcatcatatattcgtcattggcatcagataacgaaatataataaatttcatcaatagcaaaagaacacaatctgttttcattaaatgaaatagatccaataccaattttttcnnnnannttttnnnntaaaagttcagatcttgatgacattgtattttctcttaattaaatttatatttacagaagctcaagagttgcccatcctgcagcaatgttattccctgaaaaattgacgttagttagacttcccccctccctccctctaaataaaatgattatggatatatttagacgaaacgatgggatcccggcgctggtgggttattcgaagtattcacagcgctattactcccccccgttaatcctcccatgtcatggcgtaatccaccacttagcgccagacgcgcataagtgctttgaatccccgcacttggatttcctaataaccgtgcgccgttatcagtagtatcccggggaggatgttgaatggtgctatatacaacagaatctgtattccccatattctgaacagacgtattagaattagaagtcggcacctgcgaatcatgcagcgatgttttaacatcagcatacggattctgcacggtccctatgctggaagtgtcaaagaaagtcgacgaggtgctagccatcgagctacgtctgctctccatggtatcttctgacccaggggtatctacattgccctgtgcaggtgtattatttgcaggcttattctctaccgtacgtgcgcttgtagttgtagttgtagtagttgttgttgttgtttgttctaccggctgattttttcgatgaagcgcagcggtgacggcaacaccaattcccccaccaagaatcaatgcgccactaagaccgtagccagcccccgatgaaactttcagctcctcctggcgtttagcttgttgttcatcatattttttttgcgcctgagcattattttcaatggcttgctgtttggcctcttcgcctgctgctttagcctgctcttctatattcgcaacaacatcatctttcaatacccctgacggaatcgcatttccgagctcatcgatattaactttttgattatctgggttctggaacgcttctttcgttaactgatctcttgtcgcagtttcagttgcacttgcagctgcatcagggtcggtcgtggttgggctatccggctccggcgtcaatgcaagcgcctgtacaatacccgtcgccgccaaccctatcagacctgtagcaacagtccccaacgccaaccaaagtttaggatctgaacgaaggctggaagttgaggttgaggtctgagtttctgtggtgttttccgcaccgctatttgactccctcaactccccaacgccttttgactccccagcacctttggactccccggtccctttgggctctaacagctccagtatcctttggcgggcttccgtgatatctgaagcaacggtgaccatagcatgcccagcaccaccacggcctccagtaaatacaaatttgtctttaccttcaggatcaatggactgcaagcgagcgtactcttgatcacttaaaacaacagaggtctcaacaccattcctctgaccgacagcaatatgtttaccatcttcctgagtttcaactcgaaataccgaagagccaatctgcctgttaagagtatcgagcggaccatgatcatgaagaacttcaaatccatcattcagtgttatctcagacgccgccaggcgcatcggatttacaggaagtccaggaacatcactggcacgattgtcgccagaatcagccatagaattccttacaggcgtaaatagcgcacgagatcccaacggccccgtagagttaatgagctgaccacgcccccctgcaccgtcggtttgtgaaggtaatggaggtgcaggaggaattgaattattcacattgggattatgaccaagattaccaataggcataaatatctcctttttattttatgtaaatagataacaatcctttattttgctattacataataatgtatggtatacagcacgtagtcgataaacggctgaacatgacatcgaccaaataaatcacaatctgatttttgatgcaagaaaataatgtgctaaaaacacacatcgggtaacaaaataaaaataattannnnatataaaagtaaacaccacgtgaaatcttaataaaacatttcataaataaaattgcagcaaacattcacttatattaaaaaacacaaccaaagaaaaccaattaagcaaactataaatcttaattaataannanntttattaagtttctttatcgcgttttttcttacatcaacaaaggccatgctatacaccaggaagcttaatttatacctgacaaggttatccctacaatcgggtatcctgtacatgctctaaaatcgcattctgagtaatcgcttttatctcactgactttgaagccgctaaagttgcgttcaaatatttcttgtgagacttgttctatcatcttcgtctgggtgttaaaacgtgttattggatccactcttttgccgcactgctcatcaactttctgattaaagtatttattggactgcaagaagtgaccaattgatgattgtgccccgttcatatcaagaggttgctgtaacgcattttcaacagctctaaaaatgtgacctttagtctccttactaatgaccgaattattactcctgcaatagtcatccagagttctatttactgttctggatatataagtcgtctgctcctgctggaaccattgttgggtatcgccattacgagtttgtttggctacagcctgcaggagttggttagtcagtttgccatgattaatcacaaagttcgactgcacgggcatgaacctcatacccgtggctcccgtacccgcttgcattgcagctctggtaaccgcaggtttaagcgtctgtgcagtcgcctgaactaacgatctgcctgccattgtcattggactaaacataccataaacctttataaattatatttcgacagtaaaaaaattgcttcccattaaaaaataactttaaagaataattatcttgtatttatatttgaattatcctccggccttatctacaggtagttgcactacatttatcatatgctatcatgaatatgcaacactattcccgtaatcttatatctacgccttattatttgtatcagaactctcggattaattacgtttgagtatatcaacatgaaaagaatggcaggactacaatatgaatgagaaatttcgcacagaccttgcacatacgtttgggatagctcttgaagagcaaactgacgtgctctctttccacgataacgatggccatgaatggatactggagtgtgcatctcaatctgaaattctgtttttttattgttatttattgaatagcgaatcaatacagattaattcaatacttgaaatgaatagcaatcgagaactgctcggtatgtttttcctgtcattaaaagatgacaacattcttttaaatattgcatttcctgcagataaaattgatattacagagtttgctaatttaatggaaaatggttatctattaaagaatgagataattagatccttgtcttccagacctacagattttttaccttgataatttctgcgctggatgggatcatccattccgtttaacatactcttcatcacagggacctctgatttctggccgctaacgtctctgaagattcagcctgtattatctaaaagcaatgtaatatcagttaaaaagcggaaaaactccagaattataactattctggagttaagtcaggaagaaaactcaaatgctaatcataatacgctataagaggaagctcttgttgctatagccctattatcaagacgttcggtagactgtacacgacgtaacaaagaagataatcctctttcagctaagatcccctccaggggagtacgaggaaaccaggttgaagaaagtggagttatatgtctctcatttaattttctttccaaagccttagtcacaccgccagaaaacacgctaaatagcgttgagaaacatccattttccggtgttattctttgtactttgtacacataatcatcttttgggccatctttaataaagtgaacagcatagtctttgcctctaaaagagacaatggtggaatcccctatttctggatatacccgatgatggcgttgttgcattcgggctttaagctgaatttcatctacgatatcttcattgggtatatgaagccttctgttgaacctgttccatgacgcatgttcacttgtcagaaatgtcttgaataccgctcctgataacgacatgatacatctccctatataacgtattcctgattaatcacatactatgctaacagtaaaataaaaatcttcgttgatttttacaatactcccgtatgctatcgtcgtattattgcgtattaactgacaaccaccaaaaagatggtatccatctgaattaataatgtcatcttttttaacattacgcaacatgtgtatatcaatatggactgtaccgatcgcacaataaatgcgattcatgacagtctcattgctaagagcagataacagatccgcagccagaacatccgtgacagataaattattatcactcagatttactgttgctaaaggggtattaataacaatccagcaccttctctcttgactatcatcaacatgatagagtctcagactatcaccaactctcaactctgtaactggataatcagtccacccaggtacgatatagccatcaaaaaaaagagcattagaatgtggaacaaattgccaattatcattaatcagatattgtaaactttgtaccgttgtttcgagtataattacattaagtctgttttctccattattattttctattaccgga

SEQ ID NO: 1580 - DNA, 632 bp, Escherichia coli
  Strain O55:H7
ctttatttagcatcgtaaattgaacatcatcaactgacacatcaccttccggtaaggcagtctgcattacccataagatcatgagttttatcgtatcttccggtatcagccggctttcgctatacgggaataactcttggcaccactgaatgaactgttcttctgatatccagaaacgcccctcatagcccgagtatgtcaacgtgaaacgaataccatgaccgctgacctcacgaaaatatgcatggcaagcatgacctttggacgtaatatagaggcgaccggttccgataactggcaacaacggcaaataaaaatcgttaattttcatattcaattgtgaactcaatggcttcatcaggaaagatttcttttaacttatcgaaaacatagtcttttttatgatataaaaaaacatgatttctattatttgggcttactttaatagacagataaatgattccgttactacatttaattgttaaaacaattcctcgtaatcttccacaaagaatactaaacgagtgctccccttcttcaaagtagcgtcgtcttcggcccgaggagtaaaacaatctcttccataaagaagccattcgtatgaacaacgtatcaggcgatcttttttttat

SEQ ID NO: 1581 - DNA, 3793 bp, Escherichia coli
  Strain O55:H7
aatatcattaaaactttcttctccttgcggccaatcatctgatggccgaaaagaaacaggctctatcaaatttctttttagagaaactctagtcaaagtaatgttcctttatggcaaaagataatttttctactgatttattaacatgttgcagattctcttttgttcgtttttgtgaatctagcaatgaacgcttttccttcgaaagtgaagattttttctcatacaatcgctgcttttgctcatcaaatgcattgtttttaatctgatatttatacaacgacactttatccaaattcaccagcgatgcacaatatgcctgcttagaggcaatcgactctttaatggattgctcgcagtcatcgagtttaccatccacctcttttatctgagagttaatcttagccattgattctctcaatcggttcgctctgcttttacgaatagataaaattctgtccaacatactcaggcaaccactttgaataggctttcaatcgttttttcgtaactactgatatctttggtgctttgttgtataaagttctgaattaatttcctattttttattgccttatctgcttcaggatcttgccccatcgtgtactcaccaatacgaataagcagctcaacatttttataagttgcaataagctttttgcattctgccgccgcacgcaaatgctccgatgtaacaacgttatgcataacacgactggcacttaaaccaatatcaattgcagggaaatggttttcctctgcaagttctcgggtaagtacgatgtgcccatcaagaatagagcggacttcatcgccaataggatcattaacattatcgctttctaacaacaccgtataaatcgcggttattgaaccttttggcgcaggccccgctcgctctaataatttgggtaacgaagaaaaaacactcggagggaatcccccccttacatcaggttctcccgatgcaagcccaacatcacgtgcggctcgggcataacgagttacagaatccatcattaataatacatttttaccttgatcgcggaagtactctgcaatagtcgtcgccgtaaatgcggctttcatcctttccagcgcggggcggtctgacgttgtgacgaccagtacacatttagaaagcgtggattgaggtaagagcgcgaggaattcatttacttcgcgaccacgttcgccgataagagcaaggacaataatatctgcggatgcgccattacaaatcatccccaaaagcgtacttttaccaacgcctgaaccagcaaaaataccgatacgctgcccaataccgcaagttagtagcccatcaattgccctgacgccaagtataaatggctgatcaataacctgccttaataaaggatctggtggttcagcatacaagctgcgttcaaacggaagatagggggcagcaatattactctccattggtctgcctatgccatcaacaagccgcccaagtagtgcgtctccaacacgaatcttgaactcatctccctgataacttaaccactgaccacagtacatgccggaaacatgctcaaaaggcaacaagaaaacctcatcttcatcaatagcgatcacctcggctaaacgttgactgggttctatcttataaaaggcgccaatacgcgcttttggtaaacgcgccttaataatcgtcccgccgatattgataatcttgccttcatatctggtagacgaatttaatgataatgccggcacagtgctattgagcactttctgaatacgtgggtatttttccaatacagaatcatgctctgaaatcatttaccgttcctaatactttaagttcgatattattcccaacctcctgaaaagagagcacggggactgacgggaacgaaccttcaatcattttcttcacatagcgcctgatatctaaagcggtcagaatgacgccgttccccgttggattcatgatattttttaagaagccaattatctgctcagttcgctccggtgagatattcagatacgaacctgatgacgtttgtctgatcgactctcgtagctcattttcaatatcagagccaataagccaaacgttcagaagtgtaccgctaacgctatagcgacctaaaatatgccgacgcagggcaatacgaacgtattcgcacaagataaccacatccttttcttttgttgaccaaaaaataagcgtctcaaagatagttctcaggtctctaattgagacattttcctctacgagacgttgtaggatgtcaacaattttgctcaaaccaagctggcgctgcagctctttcacaagctcgttatattttctctccatgatgtccatcaaataacgcgtttcttgtacgccgatgaactctttggcattagacaatacaagtttctttagcaaaaacgttatcttatcatttgttgttgcataaacatccatacctgtaaggtgagcgagctgttgattagtcttattcgtcttatatacgatagagttagtcgaaagcttttcctggacaaattcgaatgatatctctgcatgcccagcctcaaaatagacagtatcatctataagagtatctttgtatattgactcttgatagagcaaaaattctattgcgctatcattatttttaaccggattaacaataatcttaggcaatggaattccactttcctcaaagaaattccaacgcatgacctcaatttgctgtgtaatgtctgaactataaatattactacttaagtttaaaatcaatggctcagcgcccggtgagatgttttggctattagacaaatcagctcccatagcatccttattattgccagttccaaatgttcttttcttctgtaatttccaggctatccccaacaggcaaaccgccagaaataagaagaccaatgcaggaaagcccggaataatcgccattacgagcattagtgcggcactgattaaaaaagggcgactattaacagaaacctgttgaacaatatcacctgcaaggttttcttctttttcgctttcaccgggcacacgagtaacaaccacgcccgcggtgacagaaataataagcgcagggatctgggcaaccaaagcatcaccgacagacaatacagaaaacaggctaagtgccgcactaaatggcatgtcaaattgccacataccaatgagcacgccaccaaaaaggttaactaaaacaataatgataccagcaatagcgtccccttttacaaacttcatcgccccgtccattgaaccataaaactggctttccttttgcactcgggagcgaagaacttttgcctcaagcgggtcaataacgcctgcgcgcatatcaccatcaatactcatttgctttcctggcataccatcaagggaaaaacgagcactcacttcagcaacacgctcggccccttttgtaataaccataaattgaacaatggtgataatagtaaaaataaccaggccaacaacaatattaccgccaacaacaaagttaccgaaggagtaaataatgtcacccgcatcgtgatgcagcagaataagtctggttgtactaacactgagcgacaggcgcatcaacgtcgtaatcaacaggattgtggggaaagaagttagttcaagaggattttttatatagattgagagcattaataaaagtaaagctgtcgaaatattaatcgcgataatgatatccaccacaactgttggtagtggaataatcatcatcattacagccataaagaagaagagagccagaataagatcgtgatatgactctgcttt

SEQ ID NO: 1582 - DNA, 5205 bp, Escherichia coli
  Strain O55:H7
  modified_base (913)..(913): a, c, g or t
  modified_base (3736)..(3736): a, c, g or t
tttaagagtttattcatgatgtcatcctgcgaacgcgctcaatgatctgcacatgctgttgaaaagtattcattagaaaaaaaacatcgatattggttaacaaacaacttaagcacaatttattatcgtagacaaaaatatgttcaatcactccctgcgtacgctcaggagcaagggcactaaagaaagagaaaaatgcgttttcgttatactctaaagcaaacgtaacaaaaacattattatcaattatttcaataaaaaaagaaaacccattaaaatcaatttcaacacggttatcaaataaataaaaatcatttcccaataatcttaaaaactcttcaacgtttcttttaactaaaagattcatctgcaggctctgaagtaagtatacgtgtgaatattattgcttgaaaaagcgtattggataatatatacagtatatgtactttatgtacattgcaactatttaaataatataatagttgcctatgggataatttggttatttataaccaggtaaatgtctaaattagacaaaaggagaaagatcaatggaagcagcaaatttaagtccttctggtgcagtaatgccgctggcgacctcactcagtggaaataactcagtggatgagaagacaggagtgattaaaccagaaaatggaacaaatcgcaccgttagagttatagccggattagcacttaccactacggctctggcagctctaggtacaggtattgcagcggcatgctcggagacgagcagcacagaatacttagccctgggtattacttctggcgtactaggtactcttactgcggttggcggtgcattagcgatgaaatatgcctaaccggcccatcgcataaataaaagatagaggtaatggatgtattatgcccttgcctctttcanaaaaagaggctaacagtaaatatgaacaacattaatcaatcggaaaacattaatattcaattaaataaagcgccccaaacaaatttcgttgatgagcatacctcgttagcctcagccccctctgcggcaggtgcggctcagtttcttgatcaattactccctaaaacagcgggagtgtcttctccagaacaagtgttgattgaagaaattaaaaagagacatcttgcaacaatgaacagcgatctcagtttcgatgctctatctgcaggtgggctctcgccagaagacgtgctcaccttacaaaagaatgtgctcaacgcaaacgtcaacgttgatgtcgtatctaagttagcaagcctcctttcaacatcggttacaaaattagtttcgatgcaataaaaatgaaaaaacacattaaaaacctttttttattggctgctatttgtttgacagtggcatgtaaagagcaattgtatacaggattaacagaaaaagaagctaatcagatgcaagcactgttgctatccaatgatgtcaatgtttccaaagaaatggacaaaagtggaaatatgacactcagtgtggaaaaagaggattttgttcgcgcaataacgattttaaataataacggcttcccgaaaaagaaatttgcagatatcgaggttattttcccacctagccagttagtggcatcgccatcacaagaaaatgcaaaaatcaactatctcaaagaacaagacatcgaaaggttgctaagtaaaatacctggtgttatcgattgcagcgtttcattaaatgttaacaataacgaaagtcaaccatcctcagcagccgttttagtcatcagctcgccagaggttaacttagcaccatcggtcattcagataaaaaacctagttaagaatagtgttgacgatctcaaattagaaaatattagtgttgttatcaagtcatcctcaggacaggacgggtaatatgtatgaacaataataatggcatagcaaagaatgattgtgactggctaacggcccttgattttgtaaaggatgtcaacggttcaccaacgcatctcactttttatatctaccaaaaaaatgctttcttgcacgattttggaaactactgggttctatatattgagcttagtggtgattttcgtcaggttccaacagatacatttatcagactctgcaatatcctggccgttagtaacgaatataaacaaatgggtattttcctgtctaataagaagtggtatctttgccaaatttttcataaagataataatcatcgcgcaaacatgtcaaaagcaataatgcaacatactctcgcctctttgctcgataagcaatttgataaactagagcaattatcttcatcggatacaatgatgccgccaacacacttgttttctgatataggacgaattgtgtaatgaaaaaaataagtttttttatttttacagcactattttgctgcagtgcacaagctgccccgtcctctctggaaaaaagattaggcaagagcgaatattttattattactaaaagttctccagtacgtgcaatccttaatgactttgctgctaactacagcattcctgttttcatcagtagttccgtgaatgatgatttctctggcgaaataaaaaatgaaaaacctgtaaaagtactggaaaaactgtccaaactatatcatctcacatggtattatgatgagaacatcttgtatatttataaaacaaatgaaatatcaagaagtataattacaccaacatatctggatattgactcactgctaaaatatctgagtgatacaatctcagtaaacaaaaactcttgcaatgtgagaaaaattacgacatttaactcgattgaagttcggggtgttcctgaatgtataaaatatattacatctttatcagaaagtcttgataaagaggcacagtctaaagccaaaaataaagatgttgttaaggtctttaaactgaactatgcgtcagcgacagatataacatacaaataccgtgaccaaaatgttgtcgtcccaggtgttgtctccattctgaagacaatggcaagtaatggttcacttcccagtaccggtaaaggtgccgtcgagcgaagcggtaacctgtttgataacagtgtaacgatttccgctgatccacgtcttaatgcagttgttgtaaaagaccgcgaaataacgatggatatctatcagcaattaatttctgagcttgatattgaacaaaggcaaattgaaatttctgtctcaattattgatgttgatgcaaacgatcttcagcagctcggcgtaaactggtccggtacgttaaatgcaggacaaggtacgattgcctttaatagctctaccgcacaggctaatatcagctcttctgtgataagtaatgccagtaattttatgattagggtgaatgcgttacaacagaactcgaaagctaaaatactctctcagccttcaattataaccttaaataatatgcaggcgattcttgacaaaaacgtaacgttttatacaaaagtctccggagaaaaggtggcgtctctggaaagtattacaagcggaacattgctgagagtgacaccacgtatacttgatgacagctcgaatagtcttaccggaaaacgtcgggaacgagttcgtttgttacttgatattcaggatggcaatcaatcgactaaccaaagcaatgctcaggatgccagcagcaccttacctgaagtacaaaattcagaaatgacaacagaagcgacattaagtgcaggagaaagtttattacttggcggatttatccaaganaaagaaagttcaagtaaagatggtataccgctgttaagcgacattcctgttattggtagtttattctccagtacggtaaaacaaaaacatagtgttgttcgactctttttaattaaagcaaccccgataaaatctgcatctagcgaataataaatgaggctttatgagcaggaaatttagctctctagaggatatttatgatttctaccaggatggtggcacattagcgtcattaacaaatctgacacaacaagatctcaatgaccttcattcttatgcctatacagcatatcaatctggtgatgttataaccgcaagaaatctattccatttgctcacatatctggaacactggaattatgactacaccttatctctgggcttatgtcatcagcgtttatcaaatcatgaagatgcacaactgtgtttcgcacgctgtgcaactttagttatgcaagatcccagggcatcttattattctggaattagctacttactcgtcggaaataagaaaatggccaagaaagcctttaaggcttgtttaatgtggtgtaatgaaaaagaaaaatacactacatataaagaaaatattaaaaaattgttaggtaatacagagtaaaaactaccatcagctataccaatccccaggctgactggggattttctatcggaaataataaagctgctatagtgaagtgctcccaaagttgagcaccgaccactggtagatttatctacaggtgtggggttattccattaaccaggagtttatgccctgaactatcttctgctgtatttaatatcatttccgtttatgaaacaatcagtatatcttaacttagcattagaaatctgatctttccaatcatctatagctcagagtatatttgtcaggaaatgaccttcaaactttagccgagaaaaaggcttaccctggaaaacaaaacccttaaatatagctttatttttattcttctataaaatatactcaaaaaattacgtctaactctcctttttccgcctcatgatcatttcgttccagatattagactgtcccacaataccattaccaactcggtaggtttttctttttggtccggttgttccaggactttctatcggaaccgcctcaaggttaacatcataaatgaaaatctcaaggcgcttataatgcaaattaccataactaacatatctgacacgaaatgaaattttttcttttcttctcgatatataagttataataaatgatgctctcctcaggtttataccgaatgcttcggcaatatcattgcgagaaatccatttctcctgcaatttacaccaaagagaaaccaagatatacagaggttcaccatcgtaattctttactgagtcaggaattacatagtcgccatttttatttttagattccattttccatattctttttatttgataaataaatcgacataaaaaacatacataaa

SEQ ID NO: 1583 - DNA, 1661 bp, Escherichia coli
  Strain O55:H7
ataaacttgtggcattcctgtgtttttaataactaatggttctataaatttggcataaacatcaacaaacaatttttcatttcctcttacatggcaatgtaatgtgagattattatcattactcagtacttttttagggataactaattgataatcttgttcaatgtttagcaccgagggaatttcgtaattatatcgatggacatgaagtatgatgtcctcatcttcagagaggaccccctgatacacagaagcaatatcgccgccagtgatcatatttccatttttaatcagtataccttccccacaggagtcttcattgctaataaatataatgctatagatgccatccttcataatcataactcactcagtttcatactaacctcactcctttcaatttgttctatccataagcaatatcaagaataatggagacctttctttttctccagattgcaatgtaatatatcattaaatatactcatgtttcaacctgctgtttccctggttaacatatgtaatttctgattaataatattgagtaacaacgtaaaaatgaaaaaaataatactgagtatcattctcatttcaaattactgttatgcttccgattgttttgaaattacaggaaaagcatataacatagatccattaatattaaaagcaattgcatggaatgaatcaaaatgcaaaagcggaataaaaagcaaaacaaacaaaaatggaacgtatgatataggtataatgcaaattaattcatctcatttagatttattaagcaaatttaatatatctgaagatgatttattgaatgatgcctgtataaacatatctgttgctggttatatcttagcctctaacataaaatccagagggaatacatgggatgcagttggtgcgtataatgcaggttactttaatacaccaaatgcagtagaactcagaaggcaatacgcaatgaaaatatataaaacatataataaattaaagaataatgagcaaattatcgattaataatcaaggtctatcgcaatacgaatcaattgtgccacaggttcaaaaaagtcttctgttatatattgtcctttatgtatattcttatagagagttcttgctaaaggaatatcttcaatcactggaatatcatagagttcagccagtttaatgatctgtagagctttggcatcttttcctgtttcaataactaaaggtaatggagtctccccaagtttatagtataggcaaatcgcaatgtgagtcgggtttttaacaataacggttgattttttgatgttattagccaaacttccactttgtatctcggaatgaaggcgacggcgctcccctttaatttcagggttaccatcagtatccttggcttctcgtttcacctcatctttactcattttcattttcttcagtccctcatgcttctggaaccagaaatcaaatactgaaaagagtagatatccgaatagcacgcctttccataaaagaaaaacaaaaaaggcaacaacgacaagagcttgatatgcgttcagtcctgtgaaattagcaaactcatttgcatatgaatgccccataaaataaaaaatgagaacaattatcactaacttaaatactgatttaagtagctcaaaaatgctctttacagaaaa

SEQ ID NO: 1584 - DNA, 131 bp, Escherichia coli
  Strain O55:H7
  modified_base (129)..(130): a, c, g or t
ttttcaggttattttttacactaatcttctgagccgatggttttattttttcaaccgcaaagatgaatcctatttgtgatacaccagtcgtaacagttccaacaaagacaatcaaagaaattggcaaanna

SEQ ID NO: 1585 - DNA, 2600 bp, Escherichia coli
  Strain O55:H7
  modified_base (1897)..(1900): a, c, g or t
  modified_base (2043)..(2044): a, c, g or t
  modified_base (2046)..(2049): a, c, g or t
  modified_base (2237)..(2237): a, c, g or t
tatttaataccgcacctaatatttctcgaatggcatacaaaaacggtctatttagcgagtctattgtcgtattaactaatccaactatatcaacaaaaaaactcatgccatataaagaaaaaaatgaaaataagattaatgactgcactgcagccattacctcttcactttttgttacatcgcccttcttttttagatcccttagttttttgggtgtgggcttttctgttttttcactcattaatcatgctcggtaacgatctatcaattatgtcagaatgaatatttgccgtaataaaatcaggaaaaacatgaataactaatagcaatataaagattgctatcaaactttttactggcagtgataatgtgaatacgtttagctgaggtgctgttttgttaagaaacccaaaccccatatcacataagaatataccgataatcatgggaactgaaaatgataacatcagtttaataaatgaatcccatagagaaaacaaaaaatctattaaagcacgattgaatgcaatatcggcttgtaatggtaatatctcgtaggataaatatagcttatctaggatgctttgtatcccaccatgaataacaaagatcacagagataaattggtacaaaataacgccagtgatagaagatgaatcacttatggacgggttaaaaattgaagatattgttgagcctcttagagtatcaataatctgtccagccgcatctattgcccaaaaaagaatagtaaatgataacccaatgaaaaaaccaatacttatttcttttagcgctattcctgtcaactgaaagattccagatggcaatttttccgaaaatgtatagttctctactatgatcggaagcgtaaacgcaatcataattgagttgcgaataaagttactgagtaaaacacctgttgaaaatattggtaggataataaacatccccagcggcctgagtatacaataaaatgatgatactatgaccgtcattatctcattcattagccgttcaccttcggaatcatttcaaatattatcgacgagaagttgatgattgttgttcccatccagtgataagtcagggcaagcgtagcaaacactgctattatttttagcaaaaaaggcaatgtttgatcctgtaactgcgttatagcctggaccagactaataataataccgataacagaggccgctatgactgtaggcaatgagaggataaatattatccagaacgtttgcacacataattgaacaaaatatccagtatccatcaattcaccaccaacagaaattcgaataatttttgccagcctccaacaagaatgaataataagatcttaaaaggaatcgaaattgttactggcgataccatcatcatacccaaggccaataagatattggaaatgatcaaatctatcgcaataaagggtaaatagagcaaaaaacctatcttgaatgcagcttcaagctgccccatcgtgaaagccggtaacagtataaatagagagtctttttttaagatagtttcattacccaattttttttgagctgcacgttcaaaaaactctacattgtctttctctgtatttttttctaaaaaaccgcgatatggtgataatattttctcatcaactttttgaaaaaaatcagagtcggtataattgattggttcctgagaaatattatcatttatctgtaatattatcggagacataataaacattgtcagtatcaaagacactgatgttagcgccatgtttggtggtacctgttgaatgcctaatgcgttcttcaatatccccagtacaatagaaattttcaggaatgaagtaccaataacaacaaatattggcagtaatgataacagaaaaaatacaataattaaaaannnnggctgtgagccaatggtcattaattgagacatatcatcattcctgaataatgctaagataattatctttaaatgaattcaataaaatacttatttgctctaatgggtctaaagttattctaatatattcattttctattatanntnnnntatgcggtgtgtttgcatcattaataagctgtatattgttggcctcgccaggatcaagtttaatgtctgggtttttagtgatcttaatagctccgacaatattgttattagatagagtttcccttacaacttcattaagtaaatcatcccaattaattcttgatgatgtatctaaagaatgtaatgcnttagtcagtgacaaatgaatcttattcattatgtcctgcattaagaccaactcgatagcctggatatctttaacccattttatcgattggttaacctctttatctaattttattttattattttttcgaatcctttctctcattagaatcatttttctggcaattttttttctggattctgtctttaattctttcgatttcctcctcgccctcagtaaatgttcatatgttttttttcgagccagtttgataatatcatcagattgaataatttcctgtaacttatcctctggtatgatatcttctgtaagcactaaatcaatttttatatttttaaattcataaagtttcataaggcaataa

SEQ ID NO: 1586 - DNA, 25 bp, Escherichia coli
  Strain O55:H7
taagtctgttaagaaataaatcatt

SEQ ID NO: 1587 - DNA, 1678 bp, Escherichia coli
  Strain O55:H7
  modified_base (524)..(524): a, c, g or t
  modified_base (1481)..(1481): a, c, g or t
gagttggttttatttctccacttttcggcaaaagatatttgactatggtccataaaggattatcagcaaatagccactccaaatttcctgcaccgtattttattaactcagcacaaaaccgttcttcaccatattctggtttacattgccctccctgccaatagaatgataactgcttcacattttgatatcctatctctctaatcagcgtttctcgatataatcgtgagaaaatataatcagggcattgaatgtcaaataatgcactacttagagcaagcaatcttattttcccaattgactgatataaaaaaccttccttatttatgtcagataattccacaccagaaattttatcatgtatttcctgacgcaatatcttattgagttgattacgagtagaactagtttctcttaaacgccgaaaactgacctgattgacaccggttaaatcacctagccattcatcatgaaccatcatgattggataattaattaatttataatagttatagtctattttnttaaaaattgtcatactatttttctattatttctattccgttgattcattgttgattggcttttagatcttgctggactcagtgtctctattagtttttcaatcttacttagggcagaatcatataattttcgctcttcaccatatgtgtacccctcaattaatttgtttaatttttctgccgcctgaggatctgtttttgctttttcacttaactcattaacgctttcttttacgacatcaaattcggcgattattttttttatcgcctcaatttctgatcttatttttttatctaatagttctttatttcttgtttggctcacaatactcatcctctatttattattaatcctgattcgcattatctctatagtcctaattgccgcatcacacgcaatgagcagttcctttgcttcattgtaggtaactttatccaaagggtgtttcattttttcatggatttcgttctttttgtcgtttattttttcaataaaaacatttgcggcttctttattttttattatttcatcttccagctcagttatcgttatcatttaattatttcatgttaaatatttttcagcggtattatttcttcttcagtgtccttcacaagaaaatcttctttcttcattccattcaacagtgcttctttaagccagcgtggctgtcggcctacgcccgaccaggtctgcccttcttcattgcggtagtaaacacctttcgatgagttccggcgagcgagtccatcatcaggcacattagtatatcccagctcttgtaaggttatattgtaataagtaatctgcttctgaatcgactcaattacactttgaacttcctgctctcgcagtcgctttgcttcctgctgtagaactgcaatttgctctataagctgaatgtatggacttgttgtatgtgaattattttccatattcataataaataatctccncatgctttaatattttaagctattagcgaccttatcaggaaggaccaacaattaatcaaatgatataaattatgtgagataacgtttatctatcaaattaggacacatctatttcatcaaacaaccaccttaaaatgttattattctcttttttctaatgtgtaaaatacattatcattaaatgtcaacaaaaaaat

SEQ ID NO: 1588 - DNA, 476 bp, Escherichia coli
  Strain O55:H7
aaatccatttaaaatcaatgatatagaggaaaatcatctcgttaacaaacgactttaataattgcatttccatttagttaagcgtttctctttataagatagatctcattgcataaacaaataaaacagaataaaaaccaagctgaaccgtttcactatactctacttaattcgagttacaggaaggcggcaagcgagtgaatccccaggagcttacataagtaagtgattggggtaagcgaacgcagtcgcagcacatgcaacttgaagtatgacgagtatatatatctattagctgtttcccggacataagctacagccagcactaacctggaacgggtgcattataaaaaggaacaagggacaaatagctgaacagtaaccgcgttagtctcttcccgcataaccgtaccattcgtattaagaagtattgcccatatccattcggcgaaagaggatctgccatacatcaagtc

SEQ ID NO: 1589 - DNA, 325 bp, Escherichia coli
  Strain O55:H7
  modified_base (323)..(324): a, c, g or t
tcagatcatcgccgtcattaactctgttaaagtcggacaaacgattagcaagatctgtgattcaaaagtgcttagcgctaaggtgggactggttacagattcattaaccctgttctttgtcgcacctatcgatcggtgtaatgccacaacaggtttatgttaatcagaacaatgcgcccctctataaagagaattctttgataaggcaacttgaaaagggaaagctaactgatatcaatgtaccactttagtaatcatcacattatatacaggccaaaataagtttcctgaaagccagtatctctaaatcaatcattaatgannt

SEQ ID NO: 1590 - DNA, 133 bp, Escherichia coli
  Strain O55:H7
taaaaaattatctaaattctattacttatgtaaataagtacaaccttttcatagacacaaaaactatggctgacgcatcacttgcaatcaattatccatcattagattaatattttcacttatttttcagaag

SEQ ID NO: 1591 - DNA, 7671 bp, Escherichia coli
  Strain O55:H7
  modified_base (5041)..(5041): a, c, g or t
  modified_base (6470)..(6470): a, c, g or t
aataactttctatgcgtttaaaacacccgctataaatatcttgtatattattgacactatatgatgctatatgatacttgttgccaaattgttcattacaaaccagataggagaatctctcatgataaatggacttaataatgactccgcatctttagttttagatgctgcaatgaaagttaattctgggtttaaaaaaagctgggatgagatgtcatgcgctgaaaagttatttaaagtacttagttttggtttatggaatccaacgtacagtcgtagtgaaagacaatcatttcaagagttgttaaccgttttagagcctgtatatccacttcccaatgaattaggcagagtatctgctcgtttttcagatggttcatccttaagaatttccgtcactaacagcgaacttgttgaagccgagattcgcacagcaaataatgaaaagattactgtgctcctggagtcaaacgaacaaaataggttattacaatctttacccatcgatcgccacatgccatacattcaggttcatcgtgccttatctgagatggacctgactgatactacctcaatgcgcaatctacttggttttacgtcaaaactatcaacaaccttgattcctcataatgctcaaacagatccgctttccgggcctacaccattcagctctatctttatggatacatgtcgaggactcggcaatgcaaagctttcactcaatggtgttgatatacctgcaaatgcacaaaaattgcttcgcgatgcactaggacttaaagacacacattcatcaccaacccggaatgttatagatcatggtatttctcgccatgatgcagagcaaatagcaagagaaagcagcggcagtgataaacagaaagctgaagttgtggaatttttatgccatccagaagcagcaacggccatatgctcggctttctatcaatctttcaatgtgccagccttaacgttgacacatgaaaggatctctaaagccagtgaatacaatgcggaaagatcattagatacacctaacgcttgcattaacatcagtatctctcaatcatcagatggaaacatttatgttaccagccatactggggttctgataatggcgccagaagaccgccccaacgagatgggcatgttgacgaacaggacttcttatgaagtgccgcaaggtgtgaaatgtataatcgatgaaatggtaagtgcgctacaaccaaggtatgccgcatctgaaacgtacttacaaaacacttaaaataaaactttattaatcaaaactaataatagaaaccacacccataattattaacaatttattccgaagttaatcacaattaaacaaagatatttattctgcaaacaatttacagcaaatagagaaaatgaaaagaaaaccattaattgcatttttcattgcgatatttattgcactaaccatattaatattatttccatttaattgtacttacaaaaaatcacctcaagaacactcactttcatttataaaacaattaccaaatacggtgaacttatcatctcttacttataataaagaggatgatttcctgtatgccacccagaatagccctgcacagctacttaaaataaccaaaagtggcgacatcatggacagagccccactgccttttatctctgatgccgaaacaattgaacacatacaagggaacatttttgctgcagtagacgaaaagacttctgaactattcttttttacagttacaaaagatatgcatatctcctttcgaaataaaattcagttagaaaaattcaataaaaagaatagagggtttgaagggctggcatggaaagcagatgatcggatgctgtttgtcgcaaaagaaagacgcccaagtaaaatatttatatatcaactttctccagacctgctgagtgtaaagcaagcaactattccagaggcactaaatgatatacgtgttaacgatatatccggcctggcctttaataatgaaagtctgatgattctgtccgatgaatcgcgtaaattactcaagtttaacctgacagagatgtctttcattgagatgcttgacctgacaaaaggaaatcattctctgaccagtgatttgccccaacctgaaggaattgtaactctgcctgatgaaagcatttatgttgccagtgaacctgatatcctcgcgaaatttgtccctaataagtaagtctgtcactggccttattatttatcgaccaaacctggcaatctcataaagttataaaaatacgagtataatttcacgctaaataaacacattaatagttgaaaaggatatcagttattatcaaccagaatcttactcagtctattagtattatcagacttatattagatcctacaatatatttaatttgtatgcagaatagagtgttcacaccacatctggtatagaaaagcacaggctagcaaaaacctgaataaccccgtacttacggagttattcaggttaaaaatatccataacatcacttctgatttttattgcttacgacggatataatttctctggtcagctactaatatcatcatgctcacgcgtttaatcaaactcgtgtttctcaaacggacatcgcgggacaatcttctgcttctcccggcgcattttttaccaccttcgctacctgcattttgagcggaagatccgcttttttctggcccccgcacatatgcaagtccagttttaaatttatcctttatttcattctgaaacaaactgctcataattttctccagtggaacctgcatctcagggagacatcactacagaatacttccccttatgcactgatttaattttggtcatttagaataacggcctgtaaagtctcaatgcaacagatgggtaacgctattatgaggatcctcgtcagtaaattactggcaaggcactccgataaataagaataggttccgcaacaacgttatatgcaaatacctcacgcttcggctagattatcgccggctctgttgacgaaattatggttgaaatctggatctaccacacgttgttctggctggcgatagggatgttgggtattgcaatgatttgcttgctgtttattaaagatatttagctcaccagtctgggctaagaaaaatcggcgtggcgcaaactgagccatcctcgccatttttgctatcatgcctgcatacataaacgacaaaacagtatgcagagggaaaaatgggttccaccagaaaggggatgctgaacgttctgattgccgccgtgttgtggggaagttcaggggtctgcgcgcaatacatcatggagcaaagccagatgtcgtcgcagtttttgactatgacgcgtttgatattcgccggtttgattctgctgacgctatcatttgttcatggtgataaaatcttttctattattaacaatcacaaagatgccattagcctactgattttttccgtggttggcgcgctaaccgtacagctcacttttttgctaaccatcgaaaaatcgaacgcagccacggcaacggtgctgcaattcctctcaccgactattatcgtcgcctggttctcactggtgcgtaaatcccgcccgggcattctggttttctgcgctattttgacatcgctgatcgggacttttttattggtgacacacggtaatccgacgtcattatcgatctctcctgccgcgttattctggggcattgcctcggcatttactgctgcattctataccacctatccctcaacgctgattgcccgctatggcacgttaccggtcgtcggctggagtatgctcattggcggtctgatcctgctgcccttttatgccggacaagggacaaactttatcgttaacggaagtttgattctggcgtttttttatttggtggtcattggtacgtccctgacatttagtctgtacctgaaaggagcacaattaattggcggtccaaaagccagcattttaagctgtgctgaaccattaagtagcgcgctgctctctttactgttgctggggatcaccttcacattgccggactggctgggaacgctgctgattctgtcatcggtgattttgatttcaatggattcccgccgccgcgccagaaaaataaatcgtccggcgcggcatgagtgagaattaccagccaggcaccgcaccaccgttaaagatggtttctgccgctttagcgacttcgggtgattgataagattgcagaaattccttcacgttttctgcattcttattatcttcccgtgccaccagaatattcacatacggcgaatttttatcttcaataaatacgctgtcgttaaccggagaaagtcctgtttgctggatgtaagtggtgctgataatcgctacatccactttcgggtcgtccagtacacgtggcaactgtgccccttccagctccattatctgcaaatggcgtggattatcggttatatccaacgcggtaggtaataacccttttccctctttcagagtaattagcttctctttttgcagcagtaaaagcgcgcgaccaaggttagtcgggtcgttggggatcgccactgtcgcaccttcttttatttgcgccacggttttgatttttttggaatagcccgccatagggaagacaaacgtatttcccaccgctaccagtttataaccatgcgtctgattatcttgttcaagaaagggtcgatgctggaagacgttcgcatcaagctcgccattatttgtcgcatcgttcggtagcaacgaaccgctaaatcctaccagttcaacatcgaggccatatttctcttttgctacctttttagcgacttctgcgacatcttgttctgcgccattaataacgccaactttaatatgcttttcatcgctgctgctctggtcgcaacctgccagcagaactcctgccagtaataatgcggcccccgcccgtagatgatgtgttgtcagtttcatttttttatccttttattaatgattaccggactatagcggtaaggtcgctgcagtttaaaaaangaaacgctatcgataagaataaaaaggaataaaagtggaatataaagtctggcacttcttactgaccacgcaaacacctttcgtacagcatgatgagagcggcaaaagcaaactacacttatgcttcattcgatgcacatttgcagaaggttgccgctatgaagccaacgatgctactcatgattaccgtattcctgatttttccagccctttctcaggccgagtcgccattcagttctctacagtcggcaaaagagaaaaccacggtattgcaagatttacgtaaaatttgcacgccacaggcgtcattatcagatgaagcgtgggaaaagttaatgttgtcagatgaaaacaataaacaacatatacgcgaggccatcgtggcgatggaacgtaataatcagagcaattattgggaagcgttgggtaaggtagaatgcccggatatgtaagaacggcaacaaccactgaccaacgcttctttacctgatatcaggatttcttcattttcacctttgcagtcaccaacaatgcagtcagcaacatcaatgtgccggacaacatcagcggcgaagtcagaccaatgttatccaacgcataaccgccgattgccgcaccgcaggtattggcaagctgaataacggcaacctgaatagatccagccttttctgcctgatcggccaatgagcgagtgatccacgttgaccaaccaacgggaattaaagcaaaggtcagcccccagataatcgccacaccagtagcaacaattttatcgcttccccacagcgtcagtaccagcgcgctcagggcgagcacaaacggtgcgcccgctaaggccagtttcaccgaacgtttgagaataaacgacgaaagcgatgtcccgacaaagctggcgataccaaaactcagcagcaccagggttaagccatcaacaccgaatcccgccagagtcatatacactgggcgaatataagtgaaaaaagcaaactgtccggcaaacgacataaagatggcgatcatcccggccatcactcccggacgttgtaataagcggaaagtattttgtttctgatgcgaaggttcacctggcagcgaaggcagtgatttgataatccagaaaatacacagcacacccatcgccgccgccgcattaaagacattgcgccaaccgataagctcgcctaaaaaacagcccaacggcgcggcaatcaccagcgcaatagaaaccgcgccgaagatcaccgacagcgccttcggcaccgtacgcggcggcaccagacgcatggtcagcgacgccgacatcgcccagaacccgcccagcgccagccccagacaggcacgaccgattaaaagcaaactgaatgagttagcaaaggaaaccagcaagcaggagagcgtcagcaaaacggcaaacaaaataacaacgtancggcggtcagtggcctgaattgtctgggtaataaacaaactggcaaacattgccacaaaggcggtcacggtcaccgattgcccggcaaccccttccgaaatgcctaaatcctgggccattggcgtcaacaaactgacaggcaaaaactcaacgataatcagacaggcgacgcaaaacgccaccgagaaaacggctgaccagttcggtcgggtgatggcatccgcgccgcggttttcggcaataaattcactcatggtgttacccgtggcatgtttcaggggaaaagccgaccactttaacattgaaatgtgtgacgcatttaacgtttttgcaacttttacggtgttgtgggaaaagctcgaggctgctcgaagaaataaaaatcatagggcaaggtgatatgtattttcgcgattgtgttgggaacaagggataaagtattgcacttggtgatatactttaataacaggacctcaacgatatacgcgtgtttaaaaccaaatggtttgcaagggaagccaggtctcatgcaataacagatgaagagttgtgccgggccattttagaaacagaacaaggtaaagctgatgcacttggcggtggcgtttttaaaaagcgccttcaccaaaatcgtgagcgtgcaattattctggcgaaaggggtaagcaattggttttacacgtttttatatgcaaaacaggatatgtcgaacatcaatagtcaggaactggctgggtttcgtgaaattgcaaagcattatgccttcctgacgaaagcccaactaacagcaatgattaacactaaagaactgacagagatctgctatgactgcaaaaactaaatttaaaagtcctgcatttgaggctattcacagcgcagcggctggattgtccagcgtcaatgctatttctgctgaaacgatgcgtacttttgacaaagcctgcctgaccagcgtgcaagacttacaacctgttgagataaaagcactgcgggaaaaattaaaagtgagtcagcccgtcttcgctcactatctcaataccagcgtttcaactgtacaaaaatgggaaagtggcgctaaacgccccaatggcatttcattaaaactgctcagcattgtgcaaaaacacggggtggaggtgctgctgtaaatagaacgtagataatgcgttcacctactgtcagttccgataccggatgcggc

SEQ ID NO: 1592 - DNA, 10741 bp, Escherichia coli
  Strain O55:H7
  modified_base (2218)..(2218): a, c, g or t
  modified_base (4811)..(4811): a, c, g or t
  modified_base (4814)..(4817): a, c, g or t
  modified_base (5331)..(5331): a, c, g or t
  modified_base (6117)..(6117): a, c, g or t
  modified_base (6335)..(6335): a, c, g or t
  modified_base (6386)..(6386): a, c, g or t
  modified_base (8042)..(8042): a, c, g or t
  modified_base (8047)..(8047): a, c, g or t
  modified_base (10314)..(10314): a, c, g or t
  modified_base (10624)..(10627): a, c, g or t
gccttatccaccctacaggtcaggcgcggtctgtaggctgataagacgaagcggttttaatgcagccagtgaacgccctcggcaggctgaaagaacgcgttatagcgcatctgaaaagcattaatatcctgcatttcaggttcggtttcgcgcagaaaacccagcgccagcctgacctgagcatcagtaatgggagcggcaaggcgggctttttgtaaaatccgatgccattgcagcaggttctgttcgctaccatcgacaatgacaatttgccagatgagcaacacctgcgcggcgttttgcaggtgcgactcatccggacgatgcaaataacgtaaaaattcgtcaccggctgactttcccatttgatcgaccatcgactccacgggtacgacatcgatattcagccgatcgctgagacggcgaatcgcttttctggccccggatgtcagcacccgaaaaccaaccacaaacactaccgccagcgtggcgagcattatccagatcatgagttctcctgcgtaatcagaactcatgatatctggaaaccctcgccagttactaatccaccagaataatcttcagtgcaaacagagctgcgaccaccaccacacacaggttcagatcgcgccagcgcccggtgcacactttcatgatgcagtacgacataaagccaagtgcaatcccttcggtgatcgagaaagtaaagggcatcatcaccgtggtaacaaacgcaggcaccgattcggtaaaatcatcccagttaacgcgcgccagacttgaggtcatcaacacgccaacaaagattaacgctccggcggttgcgtaaggaggaaccatcgccaccagcggtgagaagaacataaccaacaggaacataacgccgaccacaaccgcagtcagccccgtgcgaccaccgactgccacaccagaagtactttcaatataggcggtaacagacgaggtgccgataaacgcgcccgccaccgaactacgctatcaacatatagcgccttattcatattggggaatttaccgttactatctattaagccagctttatcagttacaccaattaatgttcctgatgaatcaaataggttgatcagcataaaggagaaaatgataccggcgagttcaagtgttaacgcgccgctcaaatctacttcaccaatgacgccgctaatatcaggcggaatggaatagacgccgctaaaatgaacatcaccgaaaaataatccacagcaagacgtcaccacaatagaaacaagcaccgcggcatgaaaatgacgtgatgacaacacggttataataaaaaaccctaaaatacctaacaacacgccgtgagaacttaaatcgccaatcatcaccagagtgtctttattggcgacaataacgccagtattttttaatcccattaaggcgataaataatccgattccgctggtgataccaatacgtaaacttaatggaatgttggagatcatccagtaccggatacgaaatagcgtgagcaaaaatagcccaattgcgccccagaatatcgcgcccatcccggtctgccaggagatacccatcgcccccacgaccacgaacgcaaagaaggcgttcagccccattgccggagccagcgccacgggtaagttagcaaatatccccatcgcaatactgccgataccggcaatcaaacaggtggtaacaaacaccactttcgggtccatttgtgccgtgccgaggatttgcgggttcacaaaaacgatgtacaccatggttaaaaaagtggtcatccccgcaatcaattctgtgcggacggtggtcccatgctgaggtagtttaaataatcgcgaaagcgtccctgattcattactcacgtaatcggtattgtcattattcatttttttgtccattggaggagatttaatcccttgcttttgtaaaacaaatgacaacaacggttcagtgataattatcacatttcaattgcacattaatggatattctttaataatcttgcgacatttctttatgataaataacaatcaaattaataaaatcaaaatgagaaaaatatgaataattccattaaccataaatttcatcacattagccgggcggaataccaggaattgttagccgtttcccgtggcgacgctgttgccgattatattattgataatgtctctattctcgacctgattaatggcggagaaatttccgncccaattgtgattaaagggcgttacattgccggtgttggcgcagaatacactgatgctccggctttgcagcggattgatgcccacggcgcaacggcggtgccagggtttattgatgctcacctgcatattgaatccagcatgatgacgccggtcacctttgaaaccgccaccctgcctcgcggcctgacaactgttatttgcgatcctcatgaaatcgtcaacgtgatgggcgaagccggtttcgcctggtttgcccgctgtgccgaacaggcaaggcaaaaccagtacttacaggtcagctcttgcgtacccgctctggaaggctgcgatgttaacggtgccagttttacccttgaacagatgctcgcctggcgggaccatccgcaggttaccggccttgcagaaatgatggactaccctggcgtaattagcgggcagaatgcgctgctcgataaactggatgcatttcgccacctgacgctggacggtcactgcccgggtttgggtggtaaagaacttaacgcctatattgctgcgggtattgaaaactgccacgaaagttatcagctggaagaaggacgccggaaattacaactcggcatgtcgttgatgatccgcgaagggtccgctgcccgcaatctcaacgcactggcaccgttgatcaacgaatttaacagcccgcaatgcatgctctgtactgatgaccgtaacccgtgggagatcgcccatgaaggacacatcgatgccttaattcgccgcctgatcgaacaacacaatgtgccgctgcatgtggcatatcgcgtcgccagctggtcgacggcgcgccactttggtctgaatcacctcggcttactggcacctggtaagcaggctgatatcgtcctgttgagcgatgcgcgtaaggtcacggtgcagcaggtactggtgaaaggcgaaccgattgacgcgcaaaccttacaggcggaagagtcggcgaaactggcacaatccgctccgccatatggcaacaccattgcccgccagccagtttccgccagcgactttgccctgcaatttacgcccggaaaacgctatcgggtcattgacgtcatccataacgaattgattacgcactcccactccagcgtctacagcgaaaatggttttgagcgcaatgatgtgtgctttattgccgtacttgagcgttacgggcaacgtctggctccggcttgtggtttgctcggcggctttggtctgaatgaaggcgcgctggctgcgacggtcagccatgacagccataatattgtggtgatcggtcgcagtgccgaagagatggcgctagcggtcaatcaggtgattcaggatggcggcgggttgtgcgtggtacgtaacggccaggtccaaagccatctgccgttacccattgccgggctgatgagcaccgacacggcgcagtcgctggcggagcaaattgacgccttgaaagccgccgcccgtgaatgcggtccgttacccgatgagccgtttattcagatggcgtttctttccctgccagtgatccccgcgctgaaactaaccagccaggggctgtttgatggcgagaagtttgccttcaccacgctggaagtcactgaataataaaaaaagcccggcgtcatgccgggcaaaagtcaccagttacgtttatgccactgtcaactgctgaatttttttctcgcggcggattttgcgttcttccatcaccgccactatcgccatcaggcagatacaaccaatcgcggcgatatccagcgcagcgaaggtgcctgcccagccggtaaggccgaatactggcgtcccatcggcaatcattcccagacctaacttggcaaagctgtcaccaatcaggtaagcgaaggtgcctttaataccatcggcagcgccaatcgcttttttaggtacaaagccaacagcagccacaccaatcaacaattgcgggccaaagaccaggaaacccaacgcaaagagagaagccagatagatatattcgttgctggcatgttggtacacaccgagcgtggcgataatcagcgccagcgcgatgcaggccaccaggccacggcgaccgttcgctaggtcagagagccagccccacagcagcgtaccgaccagcgcaccagcttcaaacagcgtaaagccctgaatcgccaccgctttagagagtttcagttcctggaacgcgtacacagttgaccactggtcgataccaatacgcaccacatagaggaaaatgttggcgaagcacagcagccagatcactttgtttttcagcacatactcaacaaagatctgccacttggtcatatcggtagattctgtctctttgtcctcttcgctgatctcctcgccgaacagctcttcagctttgccgaggccataagattccggggagtcgctgccgtaacgcaggccgataaaaccgacaatcagcgcgataatcgacgggaagataaacatgccgatgacatggccatcgaacaggtaatttgcgccgaacagtgccacaccagctgcgcctgcaccgccaaggttgtgagaaatgttccagaaaccgaggaacgtcccgcgtttacnacnnnncgtccatttggtgatggtggagtaactgcacgaacccccggtactctggaaaaagccacttaaggcgtagaaggcaatcatcaggaacaggctaaccgagccgctgcccatactggcgctaaagcccagcatacaaatggcagacaggatcagcatgaacggcaggaattgtttggtgtttttgccgtcggcgtagtaggaaaccagcgttttacccacgccataagtgatggagaaacccaggccgatcatccccagctgcgtcatgctcaacccgtaggtcgaaatcatatcgttctgcgcgatgttaaagttcttgcgaatcaggtacatcgtcaggtagccgataaagaccaccaggtaggattgcatgaacggtttgaaccacattttgcgccgcacttcgagcggaaggtccagggtcggcttgcggacctggtttaagaaagccagcatgggttactcctgaaatgaatacctgcgtgaggcatgcattgtaaaaatcagcagcaantcaggcctgagatagcgtccaggcaaaacctggaaaatttcttagttttgccggatatgaagtgaaaaggtgagatgcatcacgcttcgcgcggtgtctgggcgttcaaaaagggcagtaacagcagtgcggaaatcccggcggcaatggcgataaccacaaaaaatccgctccagtgccaggtatcgagcactttcgccagcggccaaccagcaagcgacgcccccagataagcaaacaagccgacaaaccccgtcgccgcccctgccgcctctttgtgggaacattctgccgccgccatgccgattaacatctgcgggccaaagacaaaaaaaccaatggtgaagaagcaggttgcctgcatcacgtagctggcaaatggcatcagccacagcgagccgactgaaagcaaaattccggcagcgaaaatcaaattcatcggcccgcggttgccgttaaacagtttgtccgagccccaacccgctaccagcgcaccgataaatccgcccagttcaaacatcgtcactgccgtattcgccgtgaccagatcgacgcccagcgtctcggacatatacaaattgccccagtcgttgatcgccgcccgaaccacatagaccagcacatagcaaaacgaaagcagccagatatacggattcaacaacacatacttggtgaggatctctttacgcgtcagccctgccccttcttgttgttgagcaatctccagcgcgtcgtgtcgccattcaccgaccgctggtaaacctaacgcctgcgggcgatcgcgcngccgccagcagagaaaaatccccacgacgatcgccatacaaccagcaatcatcatcccggcacgccagccgtaatgcagcgcagctgctgccatcacaatgggaatgagcgcaccgccaacgttatgcgccgtgttccataatgcccaccaaccaccgcgttcggtacgagaataccaggccgttaacagacgcgcacacaccggtgaaccccagccntggaaaaaggcgttcagcacccagagcacggcaaacgcccatagcgacgtngagaagccaaacagaatgttgatgatgcccgtggcgataagccctattcccataaaataacgggcatttgagcggtcgctgacaatgccggagacaaacttcgacacgccgtaggtaatgtaaaacagggtcgctaacaggccgatatcgctacggctgagcacgccattagcaaggatttctggtacggcggcgttaaaacttttacgcgtgaagtaaaacagcgcgtaacccagccagatggtcagcagaatatgccgacgccagtagcgataacgggcatcaatttcatgtttatcagtcattaatggcgcatcggcaggcgctttcagaaacggcaacatcatcaaaccttagacatagcgttgaggtagagaaacgctgacacgcgtgccgtgcagacaggaaatggtcaaggtgccgcccagcgccgttacgcgctcgcgcattccggtgaggccaaaaccttgttgcccggaacccggcggtaaaccgctgccatcgtcttcaatcaccagcatcaaccgttcatcctgctgccagccttgcagggtgaccgcgctggcatcagcatgtttcacaatgttattcagcccttcctggcagacacgaaacagcgtcacgcgctggttttcgcttaacgctgactcttcgattcgccattcgagatggctgacaatgccgcgcccttccagctccatttcccgcatcagtgagcggatggcctgctccagggtgagatcatccaactggcgcggacgtaaccgccctaacaaacggcgcaccgcgtcgtacacgcccagcgacagttgttcgatgagctgcccgctctgcttcacactggcgttatctgccgccagtcgctggacaatgcccgcttgagtacgaatggcagtgatggtctggccgatatcatcatgcagctcacgcgccacatcacggcgcacgctctcttcagtttctaacaaacgttcagcgagatgctgattgcgcgccagttccttttgcagcgactggttaagttcacgcaaccgctggatgccagcgcccagtaacaaccctgtcagactttgcaccagcagcgagagcaataaatccacaggatgatcgcgccaggtttgactggcgatcagcgcgatggcgttcatcaatgtcgctatcagcgccccttgccagccgtagtgccaggccagcgcgataatcggcagcgccaggcagaatggcgtaaagcgcgacagttcgtccggcaagcccaactggagccagagactgataacaaacagcagcaagtaccagaccagatgccgcccgcgccagttgatcggttgagaaactaacgacggcccgagcggcagccaggtgttattggcgagatagtgccagaacaccagacatatcggggccagcgtcaggccgccagttaaagttaacagcagcgcattccacgactctttgccgtgccaaagccagggcagcgactgcaacaacgccgccgccgttaacgccgcaccctgtaacagcaaggtgcgccagtcacgttgatggcgatagcgcgagatcagcgccacgggcagtaacgtcagtaaactaccgatcatcaataaggagaaatgggttaaaccgaccgcctgcgttagccagtaaatcagcagccantccgntcccagcagcaccggccagtatccgcgcgggcattgcagcattagccctagccgcagaccaaacggaaataacagcaccgccatatcagggcgctcaaccaggtgcaggctgatactccacaggcaaaaccatgcggcagagaagataaaaaagcaggcaataacggtaattaagcgggagaacaacgtcttcatcaccagccatcaaacatacggcgcgccagttcaacgtcgttactgacgcccagtttttccatcagattggcgcgatggacgtgtaccgttttcggtgacaagcccagttcggcggcaatctctttcaccgccattccttgcgccagtttttccgccacctgccgttcacgtttggttagtgggtcctggcgaccggatgccagtttaatggcaatatccggcgtcagataacagccgcctgtggcaaccgtatgcaccgcagcaatcagttcgtcagggctacaacgcttggagagaaagccacgcgcccccgcgttaagcgcctgctcaaccagcgccggactgtcatgaacggagagcataattgtcgccatacctttcggcagctggcttagcagctccagaccggagatatcgggcatggagatatcgcaaatacacacctgcacaccgcgccccggcagccccgccagcgcctcgcgccccgaaccaaactcggcaactacttgcaaatcaggttccagccccagcaactgcgcaaagccggagcggacgatgaggtgatcgtctataagggcaacggtgatcatgattgggtcctggcggataaaaaacgcgcataccttaacgataagcgcgatgttgttcaagttggatatggggtatgtattggcttaatgatgttgagcttatcgtcaaaacgcttacctgagaggtaagcgtttggtgcgtgttattgagaaaaagcgaattatttgtaggttgcaatcgtaatattgcctgagaaatttctccttagattgcggatatcattatcccttgcccaataatcatctttgtgtctataactctcatcggaatgtacatagggagaatcatcttcagcgtcgttatggataatattttcgcctttagtggtatagatataattagcaacatcaaaggtgtcattcgcgttatttacgactgcgcctaagacgcaaagggtttgagtgaatccgtattctgagaaatcgacatgctgatggtaatttctaccattcaaagcaacaaaactcggacaaacatctattgtatcgccaacagacgtagcggcgcgacgcacatcaagtgcagcgttatcgttagcaacatgaaatgcttgtgaacaggcataaaacaaatttctaatcccggtacgactggataaacaagaaataatttttgctattttttctggctttataccatcctgtactaaagaatctctcaccagatcacattcaccaggtgtgaaaacaactttcttgaatatttcctcataaacatcataagaaaaatattcagagagagtgaaagattcggtgggatgtgttaaatctgtaatttttttgctaagtaattcacttatagtgctgtttattttttcaccgcaacataaaacaaatgaacttccctccagaacttgcctttctgcatctacaaggagtgagctaaattcatcctcatgaagcttaagtttttttatacctgattgatgtaaatatttttctggaattaaatctttttgttcccttataagctctatcattcggcgttcggtttgcgtatcaaaagagtatttcatgttatagttatttttagcaacttccagcttaagagcatttgcagcaactgttaattctgagatttgatctttttcaaattgatcgtgatctgataataaccttataaactcttttacatttcgaccactaaaatccatatccctacactttttatcataacactttgtttcgccattgaactcacgatacagatcagtgattttaaatttattacttccggtctgctcaatttttatatagctattcatgcctgtaacggcaatccatgtcttataattcgcattctccgattcaggcgtaacatgaaaataaggaaccaatttatcactaatatcatgccgatagatatgaaatgaatctaaaagatataataaaaaacttcgaaaaatgtcacgaaaagtgtcatctttaaaccttgccctataattatcgagcaggccgctttgttctatcatattaaatttntaaatattatcctcgagacttttgtcgatactctcccttagactctgattttgaaactggctattatcattctctgtttccgttggatatgaataactcgtcacactaaccatagtaacctcgcaatatgacactttgcatattttgacattgttagaagtatcaatggctagcatgataaatatctcaatgctaaccgctatatttcatttatttcaataataagactatagtgccgttaatttttatcgatttccccaatgcaattgcatcactaatactacttattcactatcaaaaatcgctcatnnnntcaaaaagactgtttacacacagacggttaacaatacgtgttcaccttaatgataaacgcgctttatcaagaaaaaatcataaatcagcagttgttgcggcactggaaaatgta

SEQ ID NO: 1593 - DNA, 3755 bp, Escherichia coli
  Strain O55:H7
  modified_base (2429)..(2429): a, c, g or t
  modified_base (2571)..(2571): a, c, g or t
  modified_base (2675)..(2675): a, c, g or t
attttatcgcttttggatttttcttcgtcgacactaccggtagtaaaataacaagagcactgaagcttcacttcatttccaacattattaaccgccatcaaatacatcttctgactaaacccatttatagtaaaatcaatttctttaagatacttcccagtcccaaaaaaggcatttcctgacttttttaaacccgatgttgatgaaatggtaccattcaaactctttgagagtaactcgctaacatcttgagatgtatttcttaaaaaactctgatagccttgcaaaggagaataataaaaacatgtaatcccctgagggctggataagcaagcggttatttcatcaatcttatcatccgtaatattaccgtttgattgttttaataattcccttacctgagcacaatcatcatcattaaagcaaaccagttcaaccatttgttcaagtgtgttttgactattctttggatctttttcaattatttcaattttgtctgtaaatattttaagaatatcttcacttaactcaacaccgcagcaagttattttagtagcacccttttgttgactttgttcttttatagttcaatgagcatccataatcatggaatcaaaaaaaacatcagttcttttaaaactttcctgaacaggtacatacccttcatcttttttaattcgcagttttaataaatcatatatattacttaaaattcctgcaggaatttcgtaattaaaatccgtattcttcataacaatactattaactaatttcttcctcaaaaccgtgtcagcggaatgtgtttctaacgcagaagttttttcagacaacgatttaataatagtcgctacagccactcctgaatatggaatttcttttcgtgaaggtttatctctgccaaccagtgtaatattaaaagacttatcacctgtttgtttgatttcgatatatccatcctctccagttgccgccatccaggtacgattaccattattttccgtgcctggcatagggtggaaatagtcaagaatatcggtgttaatactccgagaaccggacatgatgtttagtattaagcgctttatttcctgcaacatccattttgcgaaattactgccaggtgaatattttttctcgttatttttaatatcaagctcagcagcgacatttctatttttatccaaaaaggtggaagggcagagatttgccatcattattccgctgtttataggacttgccataatatacctcacgatgaaccattaattaatagaatgctggtcatgaccactggtatagacagcaatcagaatttaacaccatcgctggaaattttagccctaactgtcccccccaggttaccggtgctgcgacttaaattaacgtcctgggctaataaattgtgcctgagatggtctctggcacaatttcaccctatatatctgaacggatctatcaaaaatcgctcatcagtaactcccccgagcggtttaatgtcgctccttactgaaaaaacactgcaatcttgttaaacatcgtcggatcggactgattacgctgcactttcaccacatcttccagcttatcgatttggcttatcatctgctccagacgctggtcgtcattgaccagtagccagatatggcttttgtcgctgtcctgaatcggcagacaaagaatgccttcaacgttaaaagcgcggcgggcaaaaaggccacaaacgtgggtcattacgcccggatggttgcgaacggtgagttccagaatcacgttgtcatgagttgtgttttgcatggcttattcccccaccatttctgtattcgccgcacctggcggcaccatcgggtacactttttcttcggcatcaatgcgcacatggatcagcgccggaccagggcgattgatgatttcctgcaatgcagcctgcggatcggcttcgttattcaaatcacaggtttcgaggccgaatccggcggcaatctgcataaagttgatttttcccggataggtagcggcaaaaacgccctgcttgtagaacagactctgttgctgatgcaccagccccagcgcttcgttgttcatcagaatgattttaacatccagctggttttcgctggcggtcgccatctcctgaatattcatcatcaggctgccatcgccggagaaacacaacactttgcgatccgggttcgccagcgccgcgccaatcgccgcaggcaggccaaaacccatcgtgcccagcccgccggaggtcagccactggcgtgggcgattgagcggataagcctgcgccgtccacatctgatgctgacccacatcggtggtgataatcgcattgtcatcgacacaggcggcaacggcgttgatcaggccgtaatggcttaacggatcgcacgctttcgggattggacacgggaattcgcgctgcnaatccgctaccaactggtgccactctgcacgcggttgcgcttccacctgcgggatcagctgcgccagcacgtcatcaacatccgcctgaatcgctacgtgcggctgcttgattttacccagctctgcgcggtcgatatcganatgaataattttggcattcgggcagaactgctcggttttgccaatcgcccggtcatcaaaacgcgcaccgagcacaatcaacaaatccgcctcctgcaaaatanagttggtgctgcgcacaccgtgcatccccaacatacccagcgacaacggatgcgcttttggcaacatgcccagcgccattaaagtcattgtggtaggcagctgcgctttctccgccagttcacgcactctcgcaggcgcattgatcacaccaccgcccagataaagcaccgggcgtttggcagcattaatcattgccgctgcgtcacgaatgctttcttcgctaaaggcgggcgcgacggctttttctgccaccgcgggctgtgcttcaatctcaaaaacggccgtttgcacatccttaggaatgtctatccacaccgggccagggcggcctgattgcgcaatacggaaggcatcgctcatgacctgcgggagttcttcgatatgtctgaccagatagttgtgtttggtgatggggatagagatgccgtaggtgtcgacttcctggaaggcgtcagtgccgatcattgaggcgggaacctgaccagtgatgcaaatcagcgggatggagtccagccgcgcatcagcaatggcggtcaccaggttagtcgcccccggtccgctacaggccatacagaccgccggtttaccgtcggtgcgcgccattccctgagcgataaaccccgcgccctgttcatggcgagccagaatatggcggatttgcgtgctttggcttaaggcatcgtaaacaggcaggatagaaccgcccggaatgcccgtcacaatcttaatgccctgctgttccaggaaatgaacgataaattctgcgccggtaaagcgcttacgcgtcgatgatgtgcccgaacttgccatgctccagtccttttcttctgggccgactttccgggaggtgcttaaacgaaaaaccccgcccggtttgcgccggcggggttttggaatcgtgtgttgttccagtccctacggcgcattgccgacgaccaccaccacacgcacgacgaccactgcggcggatggcgcagttggtagtagttttgcgttgagcatggaagtagtcattggggaccttgttggttttgtgtttaacaatatttatacaagcacagctttacaggggagacaat

SEQ ID NO: 1594 - DNA, 21656 bp, Escherichia coli
  Strain O55:H7
  modified_base (180)..(180): a, c, g or t
  modified_base (2228)..(2231): a, c, g or t
  modified_base (3689)..(3689): a, c, g or t
  modified_base (5184)..(5184): a, c, g or t
  modified_base (5990)..(5990): a, c, g or t
  modified_base (11216)..(11219): a, c, g or t
  modified_base (11274)..(11275): a, c, g or t
  modified_base (12135)..(12135): a, c, g or t
  modified_base (12338)..(12338): a, c, g or t
  modified_base (12441)..(12441): a, c, g or t
  modified_base (21543)..(21543): a, c, g or t
atttttcagcaagggaaaattgaggggttgatcacgttttgtactgtactgcaggtaacaaaaaaccccgccggagcgaggtttcgtcagccgcccgcggctggtaaccgcaaagcacactgtattatgtcaacacagaaagtatacgtgttccgcgcaaaacgcgcaatttcggcacgnattttgacgtatttagtgcatagttgagtatcgatcacagtttgcgttttgtccaaatattactgtttatttatacagcaagcttctataatatcactgtacgcaatgtgttatgcgggggccgcatcgttacccggcgcactaagtcctggctgaaacgggtggtgccgtcagcgccttaaccccgcgtgagcacactgtgttatgtcaacgagcacaacgtttctccttgagataccgcgtgcacaacagctggcaacaggcagcggaaaggtacgtcagctggcagtgctcctgaaccacaggagacgcgtatgagcctggtggatatcgccattcttatcctcaaactcattgttgcagcactgcaactgcttgatgctgttctgaaatacctgaagtaattcagattcaagtcgcactaaaggggagcgggtaaccgctcccattttatatttagcgtgtgggttggtgtcggatgcgatgctgacgcatcttatccgacctaccatccctcccggcaacatttattgccgcttttgtttacatattctgccgctaaacaattccccattcctggcgtatatctggctaacatttatcaatgtgatagattcctctcccgcatttatgggaatgcgtagtgacttattctaattatttttataaaagcatccgtgataatgaaaaggcatagaaacatcaatttgttattgatgttggtattactcgtggccgtcggtcagatggcgcaaaccatttatattccagctattgccgatatggcgcgcgatctcaacgttcgtgaaggggcggtgcagagcgtaatgggcgcttatctgctgacttacggtgtctcacagctgttttatggcccgatttccgaccgtgtgggtcgccgaccggtgatcctcgtcggaatgtccatttttatgctggcaacgctggtcgcggtcacgacctccagtttgacagtattgattgccgccagcgcgatgcaggggatgggcaccggcgttggcggcgtaatggcgcgtactttgccgcgtgatttatatgaacggacacagttgcgccacgctaacagcctgttaaacatgggaattcttgtcagtccgttgctcgcaccgctaatcggcggtctgctggatacgatgtggaactggcgcgcctgttatctctttttgttggtactttgtgccggtgtgaccttcagtatggcccgctggatgccggaaacgcgtccggtcgacgcaccgcgcacgcgcctgcttaccagttataaaacgcttttcggtaacagcggttttaactgttatttgctgatgctgattggcggtctggccgggattgccgcctttgaagcctgctccggcgtgctgatgggcgcggtgttagggctgagcagtatgacggtcagtattttgtttattctgccgattccggcggcattttttggggcatggtttgccggacgtcctaataaacgcttctcaacgttgatgtggcagtcggttatctgctgcctgctggctggcttactgatgtggatccccgactggtttggcgtgatgaatgtctggacgctgctcgttcccgccgcgctgttctttttcggtgccgggatgctgtttccgctggcgaccagcggcgcgatggagccgttccctttcctggcgggcacggctggcgcgctggtcggcggtctacaaaacattggttccggcgtgctggcgtcgctctctgcgatgttgccgcaaaccggtcagggcagcctggggttgttgatgaccttaatgggattgttgatcgtgctgtgctggctaccgctggcgacgcggatgtcgcatcaggggcagcccgtttaagctcacgtcaccgcagcatcgtcatcagctccatgggagaacgatgctgctttatcagatcacgcatcacccgcatatgcggcgcagagtaagaataaaacgcctgatagcccgcacaaagcacgctgtctggcgtctcctcccgagcgtgcggacacagcagatgccagtcgcacgccnnnnagccacggcgcggttgcgggttttcgctgccacaccatttttgtaatgtggcgtcaaaaagctcaatcgagatacgactgatatctgcccgcacccaacactcaaacagggcaattaaaaatttcccccacagctctgctgtcaccgaagcggccgtcatatcgccccggtcatcaaattcaagatggggaataagctgtacggagcggatgccccgttgtttgaaattgtgataaaaatcggcaggttgcagagcatccttgtactctacaaccagtttatgcctgtcctcttcagcatcaatgacctgacttcctgtcatgcgactctctcaataaatacgataagttgatgtatatgcgttacagcaaacagtattgcgagagataacaccgcgagggagatcaaaaatttgtcacggactacgtgaaattgggaaaaatcgctattcgtgacatccattaaattgcgattacgagtgtagtgccagaggatcagcgccacgatggcgaggatgccaatcgaaatccagaataacatgcccgcctggtgccagttgtgtttgatagccaacgccatcaacgcgccgtagcccagcatggtacgaaaccacgccagtgatgtacgctccggctgcagccctgggtcggcaatgcgtctggctttgcggctatccggcatacaacaccagtcccataacgatcactgctacgaccatcaatattaagctgatgattaataagctgttggtgtagggcaggtcctctttcagacgcatcgctttttcattgcgtaaccagcgcaagtagccatacatcgctaacccgccggaaaacagacacaacaacaacgccagcagttcgcgaatgacgggcgtggcgaaatctggcgcaagttgatcaagcccaacccccgccgccagaaatcctagtgcagtacggatccacgccagaaaagtacgctcattagccagcgagaagcggtaatcaggcgcttctccgaggcgggaaattttcattgttgctcctttgcaatttcactaacgctctacctttagcggttttttttaagaatttcgtccgcccgtttcctgatatgcttttgccatccgctacaaggaggtcagatgggtatcatagcgcaaaataaaatcagttcattgggcatgctattcggtgccatcgctttaatgatggggattatccacttttcattcggccctttttccgcaccaccgccaacgcttgaaagcatcgtggcggacaaaacggctgaaattaaaagaggtcttctcgccggaataaaaggcgaaaaaattaccaccgtggagagaaaagaggacgtggatgtcgataaaatcctcgatcaaagcggtatcgcactggccattgctgcgctactttgcgcatttattggcggtatgcgtaaggaaaatcgctggggcattcgcggcgcgcnggtttttggcggcgggacgctggctttccataccttgctttttggtatcggcatcgtgtgcagcattttgctgatattccttatcttttccttcctgactggcggttcactggtttaagcagcctgaataatgcccgccgggtgttcatcagcgggcattatcgtcagaacttctgttttttctcttccaccttcaccccttgtgtcggcaggccggtgtcatagtcgcgtaccactggcgaataaccatcttgtgggcgtggacgaaatgcccccatccagcgcggctgtgcatctttacgccacggacgcaggctccattggtaactgcggaacggatcgcgaattttgtccatataatccaataaggcatcatgcattttgctgcgaacgtcggcaaaatgggcatcatcgatcaggttatgcatttcatttggatcattacggcgatcgtaaagttcatcactggtgaagaggttgagcaccagtttaaagtcatccgtcacccagcaacgcaccggaataaaaccgccaaagctgtcatgctcaatctcgtagcggttaaattccaccatcacgccgcgtggctctttcactgcaaggatattttcccccggcagaatctctggtttttcaatatctgccagcgccatcattgtcggcagtaaatcgatatgactgactggcgtatcgacctgtcgccgctccccttgcggcgaacggatgatcagcggaatgcgggtgatgtcgtcatacatcgccgcccctttactgatcagcttatgtgcgcccatcatttcgccgtgatcggaggtataaataacccacgtattttcacgttgctctggctttaaggcattgatgacccgtccgatttggtcatcaacaaagtcattacaggcaaaatagagcggatggtgataaagcccgtcatcaccgactggcgatggcatcgcctgcgcccataagcggtgatgttctggtttgttcgccaggtcatcctgtgctttctcgcccagctcgtagtaaaaatcagcgtatttctctaaatactccaccggacaggtgaacgggtgatgcggctcatcatacgaaaccaccatcaggaagggttcctcggcgcgcgcgggctgttgcagaaaatccaccgctcgattgctgatgcggtgcgcccaggtgaaggtttcgtcaatatggttcgcctgtaaatcttcgacgctgtttaggccattgcgccacaggctaatctctttttccgtcagttcgctaagatagttcgccccatcgaaccagtaatcagcgtcccactccggcggacactcgccagtgccgaaatagtcatgaccgtcgagatgccatttgccgatgtaacaggtgtgatagccggcatccttaaagtagcgccccatagtggagatgtttttacccggcgcgacgttgttggtccacggcccggactggttagcgtagataccggtaaacagcccggcgcgcnccggtgtacaaaccggtgaacaggtgtaggcggaattaaagcgaataccttccgccgccagactatcaatattttgcgtattcagcggtttaccgctatagcaaccgaccatattgggggcctgggtatcggtcatgatgaacagaaaattggggcgtttcataggctatccttcgcgtcgggagtaaaggttacggctgggtcgtgacgatgccgccagctgtcaaaaatcaggtagacaatcactacggcggcaatgaaataactgatcatcgctaaccagcgcgtaccgtagccgccgaattcagccagcccggcatagacgccaatcatcgcgaacaggatgccaattgacgcgatcttgacgtttttccacggtttcatgtccaccgcaaacgcatctttgaaggtgaacggcgtggcgcgcggtttgataaaaccgatcaccagcatcacgaccacgttgatgcagaacgtacaggccagcacatagaggaaatggaagtcgaacttcaccagatagttgatggtgatgtagctgattatgccaatccccatcgccacttttgccgccagcgccgggatgcgcaggaagaaaaagcccataatgatgatggtaaccagcggcacgttgtaaatgccgttgagctgtttcatccagctatacagcccctgcggcgcgttggcgatccacggcgctaccagcaccgaaacgatagcgataaagaaaccaaatttgcgcccgacggtgaccagctgctgcggctcggcattctggttaatgatgcgacggtaaatacccatantgaataacgtactggcgctattcagaaagccgttgaaggtactgatcactgcaccaaataacaccgcgccgaagaaacccaccagtggcactggcagaacgttattgaccagcgtcgggtaggccatgtcggctttcggtagatcctgatacagatgaaacgcaatcaaccctggcagcaccagtaccagcgggtcgagcattttcagcaccgccgttaacagcgcccccttttgcccttccgccaggctttttgacgccagcgtgcgttgcacgatgccctgatttgtacaccagtaaaaggtgttcaccagaattaaaccggtaaatgccgcgccaatcggcaagggatcggtcgggccaccgactgagtttaatttctcggcgtgaacggtggtaatttgctcaatgccctgcataaagctgcccttgcccatcgcgatcaagccaaataccggcaccatcaacccgccgataaccagcccaataccgttgatggagtccgccactgccattgcgcgcagtccgccgatcaccgcatacaaaattcccgccagaccaagcaaaattaccagtagccagatagccgcaccgtgagaaatctgtagcgattccccgacgtgaaacaggctgttgagcgccaacgcgccggagtagagaacaatcggcagaaagcagacgccggtggcaatgaggaagcagaagtcgatgataatacgcgtcgttttatcataacgttcctccagaaaatcggggatggtggcaatgccgcgcttcagatagcgcggtaaaaagattagcgcgaggaagatcagcgtcaccgctgaagtcacttcccagcccatcaccgacatgccgcttttgtaggcctgcccggaaagaccaaccagttgttccgtggaaaggttggttaacattaacgaagcggcaataaccggcgcttttagtgaacgtccggcaagaaaatagccttgttgcgatccggtatctgttttgcgaaccttccaccaggtgatgatcgccaccagcagcgtaaaaccgacaaaactcaagatttgtaacgaattcatctcatagcccttatttatgtttatgtcccggacgcatgaatatagggagaggtaaaatgcgtcgggtcaggcagtcagattcttaaaatacaaacgtcgtatccctgaacggattgttttctgttaagttcaggttgtgagcataattcgccggagggatattaaaatgaatggaaaattgcaaacttcagatgtaaaaaacgaaactccatacaatattcctttattgattaacgaaaatgtgatctccagcggaatttctctgatctcgctctggcatacctacgccgacgagcattaccgggtgatctggccacgggacaagaagaaaccgcttatcgccaactcatgggttgcggtgtataccgtacaaggatgtgggaagattcttttaaagaatggcgaacaaataacactgcatggcaactgtattatatttttaaagccaatggatattcactcttatcactgtgaaggtttagtctgggaacaatactggatggaatttacccccaccagtatgatggatattcccatcggtcagcaaagcgttatttacaatggcgaaatttataatcaggaactcaccgaagttgctgagttaataacttcaccagaagcaataaaaaataatctggcagtcgcttttctgacgaaaattatttatcagtggatttgtcttatgtacgcagacggtaaaaaagatccacaacggcggcaaattgaaaaattaattgccactttacatgccagtctgcaacaacgctggagcgtagccgatatggctgccacgatcccctgtagcgaagcctggttgcgtcgtctgtttttacgctataccggaaagacaccgaaagaatattacctcgatgcgcgtctggatctggcgctatcgctattaaagcaacaaggaaactcggttggcgaagtcgctgatacgctcaacttcttcgactcctttcatttcagcaaagcctttaaacataaatttggttatgcgccttcagccgtgctaaagaatacggaccagcacccaacggatgccagtccacacaattaacgtaactctggccagtacgctttgttggcctccagcaactcatccagaatagctttggcgaccgaggcgctcggtaccgttttcgacaacgtaatcgcctgccacaggtgctgatatgaacgctgttcccaggcgtccacgaccagtttttccaccgccacttgctgactcattaaccctttctgaaactgcgggatatcgccgaccaccagtggttctggtccgttgtgcccgaccagacacgggatctcgaccatagcttcatcatcaaagttatggattgccccgttgttaggcacaatcagcaacatccgctcctgagtgttgaaggcaattgccgccgccagatcgacgatgtatgacgcatgttcgtcaatttccagcttgcccgccgctgaatttcctgccgccgtaatggcgcggcaagcatcgaaaacctgtttctcgcgatgttccattacctcattcgcgcgagtatgttcagggttggaatgctgaacgacataatccgggaagagataatatttcagataggtgttcggcaatgtatccgggtccagtgcctggacatcccgcgcttttgcataggtgtcgttccagctcgcttcagtatgtgtatcttgctgcggtggaacataaccgtgcttagagacatattgccgcagctggtgcatcaggtcgttgccctgcaaatcttcaattgatgtccaccagccaaagtggttcaggccgtagtagcgcacgcgcatctgtttgcgatcttgcagcccaacaatttgcgccatccggctttcaataccgattggcatgtcacagatgttgaggattttcgcattcgggcgcagacgacgcgtggcttctgcaacaattgctgccgggttggagtagttgagcatccaggcgtttggtgaatatttttccatataatccaccagttccaggacgccgccaatggaacgcatgccgtacgctattccgccgggtccgcaagtttcctgaccaacaacgccgtggcgcagcgggattttttcatccagttcgcgcatcgggtatttgccgacgcggatgtgcgccatgacaaaatcaacgtcgctgaacgccacttcaggatcggtggtgtaactaaacgcaatatccggcgctttttctttaaggatgactttacaggcttcggcaatcacttcctgccgcgaaccatcgttatcataaaatttcagtgcacgaagcgggaaacggtcctgattcgccaggagcatcaacacgatgcctggcgtaaaggtgcttccaccgcctgcgacaaccactgagaatttggtcattatactgcctccgtaatggcaacattttctgctgattgatgagaattaattaagctatcgagctgttcacgcagctgggatacatgcagaccaatgatcacctgaatggcatcgccactacggaagacgccgtgcgctcccagctttttaaagacttcgtcatccagcgtttgtgacatgtcatgcagtgcaatgcgtagacgcgtcgcacaattgttaatgctggagatattgccgaccccgcccagggcttgcaggataccggcagcctgatccagctctttttttggctctgccgcggtggtttggcctcgcgaggctttgtattcggcttttgagtagagtttcacttccgcatcttcacgtcccggcgtgcacatgttgaattgcagaatcagggtgcggaaaaccacgaagtacagcagggtaaagcacaacccaatggcgatttgggtcagcatcatatccgcgtggttgctgaacatcgggatccagttttgcggtaaaacctggtcaatcagacctccgcccatgttgcccaccacaccaaagagatacatcacggtcgacattgaggccgcaagcacagcgtgtaccgcaaacagcaacggtgaaatgaacaggaaggtaaattccagcggttcggtaattcccaccagcatggcggttaaggttgcgggaatcagcaaacccgccacttttacccgattttccggtgcggcagtgaagtacatcgctaaagaaatgcccacggcaccaaagatttttgagttaccgtgcagggcaaaaccgccttccgggaacaacgatttcagcggctcggcgctcaaactgaactcttgcagatgctgcgcccagtacatctgaattccgccttcaacagctgccggaccaaagataaacggtccgtagatgaagtggtgtaaaccggttgggatcagaatacgttcgaggaaggtgtaaacccacaccccaagcgcacccgccgaacgcaggaacgcttgcagagattcaatccccatttgtacttttggccagccgagcaatgtcagccaggcacaggggatcatcaccaggaaggcgataatcaccacataagacgtcccctggaaaatgccgagaaaaaccggcagttttttatcgaacagacggttatgcagcgccgtcacaatgccggaaatgataattgcgccgataatgctggtatcgagggttttaatcccggccatcattgtcagaccgctacctgccaccgcgtcctgagtgaaatcgacgccgaagtagcttctccaggtcattcccatcgcattgatgaaatagttccaggtcaggaaactcaccatcaccgccagacaagcacgcccctgcgcttgcttagcaaggccaatgggtaaaccgacagcaaaaatcagcggcatattacggaataccgtccaaccgccctcttcaataatgtgtacgatttgcgcgaataaactgttcggatcggtcagtgattccccgacaaacatcgggttttgcagcaagatggcaagacccaccacaatcccggcgaagggaaacagcagcactggcgtgaacatcgcgccgccaaagcgttgaatttgactgagcatttccacatcctcttttctcaattctgtaagtaggaagcctgattggttatgcggcaggcctggagcgaggataggaagatgcgatcggcagaacatgacgacccaatgggattcgtgatcgctttcatgcttttcgttgggcggtagagatctactttttcnnnnaaaagtagatctctgtgagcactggtacacagcatcgaacacatctttaaaaaanngatgttttttcaattgattaagcagaacttgtgggcgcattacccgggcttgcaggcaaaaaagagatctagagatgatctacaaaagcattgcggagcggttaagaattcgacttaattccgcggatttcacgctaaacagccttcttcccggtgaaaaaaagctggcggaagagtttgcggtatcgcggatgaccatccgtaaagcgattgacctgctggtagcgtgggggctggtggtccgccgccacggcagcggcacttacctggtgcgcaaagatgtgctgcatcaaaccgccagcctgaccgggctggtggaggtgttaaaacggcagggaaaaacagtcaccagccaggtgctgatttttgaaatcatgcctgcgcctccggcaattgccagccagttgcggattcaaatcaacgagcagatctacttctcccgtcgcgttcgttttgtggaagggaaaccgctgatgctggaagacagctatatgccggtaaaactgttccgtaacctttcgctgcaacatctggaagggtcgaagtttgaatatattgaacaagagtgcgggattttgattggcggtaattatgaaagcctgacgccggtgctcgccgatagactgctggcgcggcaaatgaaggtagcggaacacacgccactgctgcggatcacctcgttgtcatatagcgagagcggggagtttttgaattattcagtgatgttcagaaatgccagcgaataccaggtggagtaccatttacggcgactccacccggacaagagttaaccgatactccagaagagcaccgccagtaattggggggtgataatgcgcaggaacatcactaacggatanacagtggcgtaagagagcgccgccgcaccgctggttggatgaagattattagcaaacgccagcgccggaggatcggtcatggaacctgccagcatcccgcacatggtcaggtaattcattttggctaacatccgcgccagaatgccaacagtaatcagcggaacggcggtgatcagggcaccataaccaatccagcttagccnttcgccattgaccagggtattcacaaaatccccaccagatttcagaccaacgaccgagaggaacagcacgatccccagttcccgcagcgcgaggttggcactnggcggcataaaccagtacagcttgccgatactgccgatacgcccgaggatcaacgccataatcagcggaccgcccgccagccccagtttcaacgcggccgggaatcctggcacaaagacgggaatagaacctaacaatacgccaagcccgatgccaataaacactggcagcatctgaacctgttgcagtttttgctgcgcattccccagcacattggcaacggcatcaattgcggacggacgccccaccaggttgaggatatcgccgaactgcaggctgatatcgccactggcgaccagttcgaccccggcacggttcaggcgcgagataacaacgtcatagcgttctttaaaatgcaggtcgcgaatacgcttaccaagcacgttttcattggtgaccaccacacgctcgacgcgcaaatcagtgcctttcgtggacagcgaagtatcgacctcctgaccaatcaccagttgcgcattatgtaaatccgctggctgacccaccagatgcagcaaatcgcccagttggataatggtatctggcgaaggaacttttagggtttcttcgcgtttcagacgcgagcagataattttgtcgccgttgagaatcggtacatctttaatggctaaatcatgcaggttagggttctcaacgcgaatattgatagtcttgatcagcgcgccgccattggtgcgtgaagactcgtgctgctgggcttctgtctcgacattgacgcggaaaataacccgcaacatccacatggtgaacaatatcccgcaaatgccgaatggatacgccatcgcgtaactcatccccatctgatcgaccatttccattggtgtacccaggtcgcgcaaaatctgctgccctgcccccagcgctggcgtattggttaccgcaccggagaaaatccccagcactaccggcagtggaatatcaaacagtttatgcaggatggcggtaaccagaccaccgatgatgacgatcagaacagcaaacaggttgaggcgtaatccggagacgcgcaatgaggcaaagaagcccggccctacctgaatcccgatggtataaacgaacaggatcaggccaaattcctgaataacatgcagcatatcgctacttaatgtcatccccgcctgagaaacaaaatggccgacgatgatcccaccaaacagcacgccgccaatacctaatcctatgccgcgaaatttgacgttgccgataaacaaaccgacgactgccaccaaagccaaaatactgaccgttaatgctatatcactcatcgtccatttctcttgagataacattttaattgctacggattatggctgaatcggtgaagcagatttgccttatagcgcacattatcacgggaaagaacgtgccgaaatatcttaaacagtcgaaatttaacgcattgttgaagaagaaagacaaaaaaagccccaccagaatggcggggcaaagagaatagctagttagctatttaacgcgggacgttcgctgatagcgatacgctgcgctgcgatgggttcaggctcattacgaattaaatcaatatgcagtaaaccgtttacgaaggttgcgccagagacttccatattttcagccagcgtaaagctcaggctaaatggctgattcataagcccttgatgcagccattttttctcttcttttggctgctccggcgtgccttttacgctcaggcgcgtaccttccagttgaatctctaaatcttcctgacggaaacctgccagcgcaagggtaatgcggtagtggttatcgtcgcttttctcaatgttgtacggcgggaagctctgactttcaccggcgttttgcagtgcgttggccagtttgtcaaaaccgatccattgacgcatcagtggggataaatcgaagttacgcatagtcatttctccttctaagaagcgagtaagtacctgcaaatccgaagattcgcatatgctccctgacggcgagcatggagatgtcaggccgcgcaaggcggccttaggaaattagttgatttcgatacggcgcggttttttcgcttccggaatcacgcgttcgagatcgatatacagcaaaccatttactaggttagcaccacgaacatgaatgttctcagctaactggaatttgcgttcaaagttgcgttcagcgataccctggtacagataggtgcgctctttttgttcgtcggcgtgagcacctttcaccaccagcagattatcctgggcggtaatttccagttcgctctcagcaaaaccagccacagcgatagcaatgcggtaatggttttcgtctaccagttcaacgttatacggagggtagccgccattactctggctctggttgttttctaagtggttaaacaaacggtcaaatccaatagcagaacggtaaagcggggataaatcaaagttacgcataatcaatagctcctgaaatcagcgagaatgtaagaccttccacaatggacaggtcaggtagccagaacacccatcaggcgcgtcctcatcggctacgatgtaaaaatgggtctggaaatgaacttttcaagccttatcagcggacttttttttgcagtttatggtctattgcatagactgagggggcagcacgaaacgttaaagtgcgatagccgccacagagcgacgtaatgatgatgttattttcagcaagggatcgctataactcatcaggccaacacccacgatcaacagatgaatttattatgataagaaatgtgttgttagcgttcatgatatgcagcggaatggcattactcggaggatgctccagcgtgatgtcccataccggagggaaagaaggaacgtatcccggcacccgcgccagcgccaccatgattggcgatgatgaaaccaactggggcactaagtcgctggcgattctcgatatgccgtttaccgctgtgatggacacgcttttattaccgtgggatgtgttccgcaaagacagctcggtgcgctcacgcgttgaaaaaagcgaagccaacgcgcaagccaccaatgcggttattccaccggccagaatgcctgataactgatttagcgatcagtttcggtgatccacagctggccgccttccatccacgccagccactgaccatccggcgagaagaccacggcgtccgcagaaggtggattggcgtggttttcggttaaatactcaacctcgccgctttgcgcatgggcacaagcaattcgattacccagcacaaagcccaaccattctcctgacggatgccagttaaatgcagactgaatatccgttttgttatgggttaactggcgcggctcgccgccctgtggcgagataagccacagttgcacaatgccgttatcatctcgcattaaaaacgcgatttgcgtaccctgcggattacagcgcacccagtggcgcgggacgttgactaaccccggataagcccgatggtgggtaaaggttaaacgtcgctgcacgatgccacgcggtggcgcgggcagggttgtttccgttccacttaacggcgcatcacctgctgctttccagccagcttcatcttgcggtaactcaacgataaacagctccggcactttctcgccctttggcgaaagtgtgtcgccaataaacgccagcgcgtgatttcctacccatccttcttcataagcacgattgatttcatcgctgccaggctgcggcgtgggcgtggttttactcaccagcacgcaccagtggctaccgctgtattcacgcggatgctgcttttgtacgttgaccgggccaaacggtgcagcaaccccgacgtttcgcaaatccagcgccgaatcgaactgatgcattacatggtcgttataggtaaaactcaccatttcaccgttcgggctaaagacatgcacatggctgccgccacgcagcgcccctgatgtgtacggaacggtaatatccattgcatcgagattgttcatcttgccgccttcaacaatcacgccgcgacggtgatggaaatcgtaatgccatgtttcatgaggattttcaggtccgtggataaagacatatttctctgactttggatgaacggtcaccacgccgacgtgcgcgccctgtgacacgcgatagataacctcgacctcgccggtatggatattcacacgctcaatggtctcgccggtaaacgacgcgccagaaggacgcacgtcaaataccagccactggctgtcgggcgtccaggtattggtattggtgagcaggtgattacggggagcaaaggttatctgtttcatggcgcggtcctgatacaaaacggttcccgccatcatacttcacaaggacttcactttcagacaatagtcttttgccatcgtgatgaatgtgagtgaaaagatggaacatttcgacgtggcgattattggcctcggcccggcagggtcggcgttggcacgaaagttagccggcaaaatgcaggtgatcgcgctggataaaaagcaccagcatggtactgaaggtttcagcaagccttgtggcggtctgctggcaccggacgcgcagcgatcttttattcgcgatggactgacgcttcctgtcgatgtgatcgccaatccacagattttcagcgtcaaaactgtcgacgtcgccgcatcgctcacgcgtaactaccagcgaagctatatcaatattaatcgccatgctttcgacttgtggatgaaatcgctgatccccgccagcgttgaggtttatcacgatagcctgtgccggaaaatctggcgtgaggatgataaatggcatgtcatttttcgtgcagacggttgggagcagcatattactgcccgctatctggtcggtgcagatggtgccaactcgatggtgcggcgatatctctacccggaccatcagattcgtaaatatgtcgctatccagcagtggttcgcagagaaacatccggtgccgttctactcatgcatctttgataatgcgataactgactgttactcatggagtatcagcaaagacggttattttatctttggcggtgcctatccaatgaaagacggtcagacgcgtttcacgacgctgaaagagaaaatgagcgcctttcaattccagtttggtaaggcggtaaaaagcgaaaaatgcacggtgctatttccctcacgctggcaggattttgtctgcggtaaggacaacgcctttctgattggtgaagcggcgggatttatcagcgccagctcgctggaggggataagctatgcgctggatagcgcagagattctgcgttcggtgttactgaagcagccagagaagatcaacgcagcctactggcacgccacccgcaaactgcgtttaaaactcttcggcaagatagtaaaaagccgatgcctgaccgcaccggctttaagaaagtggattatgcgcagtggtatggcgcatattccacagttgaaagattagccaacgcgcgtcacatcgcccaccagcaggatgtaagagagcgcgccaatcaacgcgacggcggagatataaaccagtgcaggtgcgaacccatagccttgcaacagatattagtccacaaaaaaacacctcataagaaaaggtcttatatcgggcagaaatctgaaaagggagatcaggcgctaaacaggagggaaagaagagtatgctttcaacggcttagctactcgtttaaaggattaatcatgaagttgaattttaagggattttttaaggctgccagtttattcccactggcgctgatgctttcaggctgtatctcgtatgctctggtttcccataccgcaaagggtagttcaggaaagtatcaatcgcagtcagacaccatcactgggctatcgcaggcaaaagatagtaatggaacaaaaggctatgtttttgtaggggaatcgctggattaccttatcactgatggtgccgatgacatcgttaagatgctcaatgatccagcacttaaccggcacaatattcaggttgccaatgacgcaagatttgttttaaatgcggggaaaaagaaatttaccggcacaatatcgctttactactactggaataacgaagaagaaaaggcactggcaacgcattatggttttgcctgtggtgttcaacactgtaccaggtcactggaaaacctaaaaggcacaatccatgagaaaaataaaaacatagattactcaaaggtgatggcgttctaccatccatttaaagtgcgattttatgaatactattcacccagaggcattccggatggtgtttccgcagcattactgccagtgactgttacgctggacatcattactgcgccgctgcaatttctggttgtatatgcagtaaaccaataatcagtaagcgggcaaacgcgtttatgctgtttgcccgcccacagattaattcagcacatacttctcaatagcaaacgccacgccatcttcaaggttggatttggtgacaaagttcgccacttctttcaccgaaggaatagcattatccattgccacaccgacgcctgcatattcaatcattgcgatgtcgttttcctgatcgccaatcgccatgatttcttccggtttaatacctaacacgtcggccagtgatttcacacccgtacctttgttaacgcgtttatcaaggatttcgaggaagtacggcgcacttttcagcacggtatatttctctttcacttcctgcggaatacgcgcgatagcctggtcgaggatggcgggttcatcaatcatcatcactttcaggaactgggtattggggtccattttctccgcttcgcagaacaccagcggaatggtggcaacgaaggattcatgcaccgtgtagtagctgatatcacggttggcggtgtacagcgtggtgcggtccagggcgtggaaatgagaaccgacttcgcgagagagtttttccaggaaacgatagtcgtcatagctgagagcagtttgcgccacggtgttaccatcagcggccttctgtaccagcgcgccgttataagtaatgcagtagtcgcccggctgttccatatgcagctctttcaggtaattgtgaacacctgcataagggcgacccgtcgttagcacgacattcacgccacgggcgcgagctgcggcaatcgcatttttaacggcaggtgaaatggtgtgatcgggcagcagaagggtgccatccatatcgatagcaatgagtttgatagccatgagttccccaggtagattggttcctgacccatgctaacgcgattccgctcaaaaatcagtacaacacccgagggaaaagggggatgcaacgcgggttgcatgctccccatttgcttagcggaagagtttccctttcagcagttccatgcctgcggaaagcagatcgttattggcttgtggtgacacttcaccttgcggtgagagcgcatcaataatcttcggcaattgttctgccagtaaacaggaagccgtactggtatccacgccaagtttttgtccaagatcggataccgcgtttgtgccgagtgctgattccagttgctcgccgctaactggttgattgccctgttgattactcagccaggttgagagaatggcccctaagccgccactttgcagtttttccagcagcacctgaatgccaccctgctcctcaacccaacttaaaatcgcctgatatttccccgcatcgcctttcagaaaggcgccgacaacttcatcaaaaagccccatgataatcacctgtaaagcgttacgtgttgacccaaaaagtatagaactgcgggatgataattgcggattgcagaaataaaaagggcggagatgatctccgcccttttcttatagcttcttgccggatgcggcgtgaacgccttatccggcctacaaaaacatgcaaattcaatatattgcaggagtctcgtaggcctgataagcgtagcgcatcaggcacgctcgcattgttaacgccattaaatatcaatattcgccgctttcagggcgttctcttcaataaacgcacggcgcggttcaacggcgtcgcccatcagcgtggtgaacaactggtcagcggcaatcgcatccttaacggtaacgcgcagcatacgacggctttccgggtccatggtggtttcccacagctgttccgggttcatctcgcccagacctttataacgctggatggagaggccgcgacgggactctttcaccagccagtccagcgcctgctcgaagctggctaccggctgacgacgctcgccacgttcgataaacgcatcttcttccagcaagccacgcagtttctcacccagcgtgcagatacgacgatattcgccaccggtgataaactcgtgatccagcggatagtcagtatccacaccgtgggtacgcacgcgaacaatcggctcgaacaggttttgttcggcattggtgtggacatcaaacttccactggctgccgtgctgttctttgtcgttcagttcgctgaccagcgcgttcacccaccgggtaacggtctgctcatcagagaggtcggcttccgtcagcgtcggctgatagataagctctttcagcattgctttcggataacgacgctccatgcggttgatcattttctgcgtcgcgttgtactcagacaccagtttctctaacgcttcgccagccaatgccggtgcgctggcgttggtgtgcagcgttgcgccgtccagcgcgatagagatctggtactgatccatcgcttcgtcgtctttaatgtactgttcctgcttgcctttcttcactttgtacagcggcggctgagcgatgtagacgtgaccgcgttcaacaatttccggcatctgacgatagaagaaggtcaacagcagcgtacgaatgtgcgagccgtcgacgtccgcatcggtcatgatgatgatgctgtgataacgcagtttgtccgggttgtactcgtcacgaccgataccacaaccaagcgcggtgataagcgtcgccacttcctgagaagagagcatcttatcgaagcgcgctttctcgacgttgaggattttacccttcagcggcagaatcgcctggttcttgcggttacgcccctgcttcgcagagccgcccgcggagnccccttccacaaggtacagttcggaaagcgccggatcgcgttcctggcagtctgccagtttgcccggcaggcccgctaagtcgagcgcacctttacggcgggtcatttcacgc

SEQ ID NO: 1595 - DNA, 23720 bp, Escherichia coli
  Strain O55:H7
  modified_base (27)..(27): a, c, g or t
  modified_base (897)..(897): a, c, g or t
  modified_base (1296)..(1296): a, c, g or t
  modified_base (5155)..(5155): a, c, g or t
  modified_base (6252)..(6252): a, c, g or t
  modified_base (8091)..(8091): a, c, g or t
  modified_base (8607)..(8607): a, c, g or t
  modified_base (10308)..(10308): a, c, g or t
  modified_base (16091)..(16091): a, c, g or t
  modified_base (16698)..(16698): a, c, g or t
  modified_base (17813)..(17813): a, c, g or t
  modified_base (19036)..(19036): a, c, g or t
  modified_base (21916)..(21916): a, c, g or t
gccgcttcacgggcacgggcagcatcnataattttgccaaccacgattttcgcgtcagttgggttttccagcaggtattccgccaacagttcgttcatctgctgttcaaccgccgatttcacctcagaagaaaccagtttgtctttggtctgggaggagaatttcgggtccggcacttttacggaaacgaccgcaatcaggccttcacgcgcatcgtcaccggtggcgctgactttggcttttttgctgtagccttctttgtccatgtaggcattcagggtacgggtcatcgccgcacggaagcctgccaggtgagtaccgccgtcacgctgcggaatgttgttggtaaagcagtagatgttttcctggaagccatcgttccactgcagcgccacttcaacgccgataccgtctttttcggtggagaagtagaagatatttgggtggatcggcgttttgttcttgttcagatattcaacgaacgctttgatgccgccttcatagtggaagtggtcttctttgccgtcacgcttgtcgcgcagacgaatggaaacgccggagttgaggaacgacaactcacgcagacgtttcgccagaatttcatattcgaactcggtcacattggtgaaggtttcgaggctgggccagaaacgcaccatggtgccggttttttcagtctcgccggtaaccgccagcggtgcctgcggtacaccgtgttcgtagatctgacggtgaattttaccctcgcgctgaataaccagctccagtttttgcgacagggcgtttactaccgaaacaccaacgccgtgcagaccgccggacactttataggagttatcgtcaaatttaccgcctgcgtgcagaacggtcatgatcacttccgccgccgatacgccntcttccgggtgaataccggtcggaatgccgcgcccgtcatcctgtacagagacagagttatcggcgtgaatggtgacgataatttctttacagtgacccgcgagcgcttcgtcgatagcgttatctaccacctcgaataccatgtggtgcagaccggtgccgtcatccgtgtcgccgatatacatacccgggcgcttacgcaccgcatccagccctttcaggactttgatactggaggagtcataagaattcgacatcaacgtttctcgctcatttatacttgggttaatccgttattttacccttttccacggtaaacatcttcgaattttcgtccgacatgtctataacgtgttcagcactgatcgcgctgacaaagacctgcgattgcgtagcttntaagcggctggcaagcagcccgcgacgctcatcatcaagctcagaggcaaaatcatctatcaggtagagacaccgccgcccgctttcacgggtgaggaactctccttgcgccagacgtaaggcgcacatcaacagcttaagctgcccacgcgataaggtatcttccaccggcgcaccgtcggcgcgaatgcgtaagtccgctttatgcgggccatgcgcggtgtaggttagctggcgatcgcgttcaaaattacgttccagcacctcagcatattctgtctctttctcccagccgcgctggaaagagaaagtcagagaaaactcagggagaaattgcttacaggtatcagccatatcggccgcgataccggcgctatactccgcgcgccaggtactgatttgctccgccagcgggatcagttctttatcccacgggcgtagctgttcgtaacgtgtcacctggcgcagcgccgcattgcgctgcttgagcaatcgcttgagattgctccaggcggtgaaaaatccgggttcgttgtgaaagcatccccagtcgaggaatgctcttctgtatttggggccgccgttgagtaaagtaaacccttctggcgttatcagctgcattggcatcaggtgcgccagttccgcgactttatgcccgtcagtaccgtcgatgcggactttgctgtcgccctgtttgtctttggttaagccaatcgccgtctcgcgctcttcgccctgtaatcgcccgtggagaacaaacgcctcctgctcgtggcgaatgacgcgaccaatctgcaaactgcgaaacgcccgaccatggccgagcgtatagatggcttccagcacgctggttttgccactgccgttggcacctaccagaaagttaaagccgggagataaagcgagatccgcggtttcaatgttgcggaaatcgcggatcaacaagcgggtgagggacattacagtctcattggcatgacaacataagccgcgctctggctggctgcatcttcaatctgcacgctggaaaccgaatcggtcagcatcatgcggacgttttcgcatttcagcgcgttcagaacatccagcacatagctgacgttgaagccgatttccatctccgcaccgctataggtaacgtcgaggatctcttccgcttcttcctgttccgggttgttggcggtgattttcagctggttttcgctgacatacaggcgcacaccgcggaatttctcgttagagagaattgccgcgcgagcaaacgcctgcttgaggagatcgcagcctgcttccagatgtttgtccggattcttcggcagaacgcggcggtaatccgggaagcgaccatccaccagtttagaggtgaagataaagtcgccaacgtgggcgcgaatattgttgctgccaatctgcacacgcagcggattatcgccgccgtcgagcatacgcatcagttcaatcacgcctttacgcggcacgatcaccgaatggcttggcaaagattgaccaattggcattgaacagaccgccagacggtggccgtcggtcgctacggtgcgcagttcttcaccttcggtttcaaacagcataccgtttaagtaatagcgaacgtcctgatgcgccatagaaaactgggtcgcttcaatcagacgcttcatcgtcgcctgcggcagggtaaattcgacttcactctgccagtcatcgaggttcgggaaatccgccgctggcagggtagacagcgaaaaacggctacgcccggagcgcaccagcatccgctcaccttccagctgcacggcaatttccgcgccttcaggcagaccacggcagatatcaaagaatttgcgcgccggaacggtcgtcgctcctggctcgtgtggctgaaccagcgcaacgcgtgccaccatttccatctcgagatcagtaccggtcagcgacaacgtaccgtcagcaacctgtaacagcagattaccgagaatcggtagcgtaggacgaccacctaacggaccgctcacctgttgtagcggttttaataaatgctcacgttctacggtaaatttcataggtttacgatgacaatgttctgattaaatttgaaaaatcttctttgatatcgtggctctcttcacgcagctgctcgatcttccggcaggcatgaagcaccgtagtgtggtcacgaccaccaaacgcatcgccaatctctggcagactgtggttagtcagctctttcgccagcgccatcgccatctgacgcggacgagccaccgagcgggatcgacgcttggaaaggagatccgcgactttgatcttgtagtactccgccaccgtcttctgaatattgtcgatggtgaccagtttttcctgcaatgccagcaagtcgcgcagcgcctcacgcacgaagtcgatagtgatcgcccgtccggtaaagttggcgttggcaatgacgcggttcagcgcgccttccagctcacgtacgttagatcgtagacgcttggcgataaagaacgccacttcgcctggcaaacgaatgtcattttcgtcggcctttttcatcaggatcgccacgcgggtttctaactctggcggttcgatcgccacagtcagcccccagccgaagcgggatttcaaacgatcctcaacgccgttgatctctttcggatagcgatccgaggtgagaatgatctgttgattaccttccagcagggcgttgaaggtgtggaaaaactcttcctgagatcgttctttattagcaaaaaactgaatatcgtcgatcagcagtgcatctacggaacggtagtagcgtttaaactcttcgatcgcgttgttttgcagggctttaaccatgtcctgaacaaagcgctcggagtgcatataaaccactttggcattcggcttgcgcgccataatgccgttacccaccgcatgcagcaggtgagttttacccagacccgtgccgccataaaggaacaacgggttataggcaccgccagggttatctgccacctggcgagccgccgcgcgcgccagttggttagatttaccttcaacgaagttatcaaacgtgtgtttgacgtttacgttagaacgataggtcggttctgccggggccgggacgttatcccaacctgagcgcgtagaaggcgcagcacgttgcggctgcgtttgcgccacctgtgcaggggccgcgacgttgctcgtcactgccgcttgtggcgtttgcgtcaccgatttggtgccgacttcaaaacgcagctgtggggcatccgctccgcagaaactggttagcagtccattgatattattaaggtacttgtcccgtacccaatcgaggacaaaacggtttggcgcgtacagggccagcgtgttatcgctcagttccgcctgcaatgggcgtatccacatactgaattctgtggctggtaactcatcctgcaatcgggcaagacactgctgccaaagcgaaagtgacacggcggactccactcgaacaaaagtcgataatgactaaggctgaaacattcatgattgttgacgtacgtcgaaaagaccctgcttgagggtgacgcacgaaccgctgtctgcggttatatgcccgatcaagatcctgcaaaacgatcgggaccgcggatcatagcctaaactgcgcaagagatcttctgtttctcacagattttcccgatttatccacaggatgatccagaactcgctaagtgtaaacgatcctgccgcgaggcgggcacgatttacgccgcatattggaaaatttaatgaccatagacaaaaattggcttaatcgatctaataaagatccaggacgatccttgcgctttacccatcagcccgtataatcctccacccggcncgccatgctggttttcactggtgtgaggccgtacgttttccctgcgaaaaggtgcggaaaagcgcggtaaataaggaaagagaattgactccggagtgtacaattattacaatccggcctctttaatcacccatggcttcggtgtccatcgtttcatttttcggcggatatccaataaagccattgaatttattcaagtttaggtagaaatcgccatgaaacgcacttttcaaccgtctgtactgaagcgcaaccgttctcacggcttccgtgctcgtatggctactaaaaatggtcgtcaggttctggcacgtcgtcgtgctaaaggccgcgctcgtctgaccgtttctaagtaataaagctaacccctgagtggttaagctcgcatttcccagggagttacgcttgttaactcccagtcaattcacattcgtcttccagcagccacaacgggctggcacgccgcaaattaccattctcggccgcctgaattcgctggggcatccccgtatcggtcttacagtcgccaagaaaaacgttcgacgcgcccatgaacgcaatcggattaaacgtctgacgcgtgaaagcttccgtctgcgccaacatgaactcccggctatggatttcgtggtggtggcgaaaaaaggggttgccgacctcgataaccgtgctctctcggaagcgttggaaaaattatggcgccgccactgtcgcctggctcgcgggtcctgatagccctcattcgggtctatcaacgcctgattagtccgctactcgggccgcattgtcgtttcactccaacctgttcaagctacggaattgaggcattgcgcaggtttggagtgataaaaggcagttggttgacggtgaaacgcgtattaaaatgccaccctttacaccctggtggtgacgatcccgtcccgcccggaccatttaataccagagaacactaacgatggattcgcaacgcaatcttttagtcatcgctttgctgttcgtgtctttcatgatctggcaagcctgggagcaggataaaaacccgcaacctcaggcccaacagaccacgcagacaacgaccaccgcagcgggtagcgccnccgaccagggcgtaccggccagtggccaggggaaactgatctcggttaagaccgacgtgcttgatctgaccatcaacacccgtggtggtgatgttgagcaagctctgctgcctgcttacccgaaagagctgaactctacccagccgttccagctgctggaaacttcaccgcagtttatttatcaggcacagagcggtctgaccggtcgtgatggcccagataacccggctaacggcccgcgtccgctgtataacgttgaaaaagacgcttatgtgctggctgaaggtcaaaacgaactgcaggtgccgatgacgtataccgacgcggcaggcaacacgtttaccaaaacgtttgtcctgaaacggggtgattacgctgtcaacgtcaactacaacgtgcagaacgctggcgagaaaccgctggaaatctccacctttggtcagttgaagcaatccatcactctgccaccgcatctcgataccggaagcagcaacttcgcactgcacaccttccgtggcgcggcgtactccacgcctgacgagaagtacgagaaatacaagttcgataccattgccgataacgaaaacctgaacatctcttcgaaaggtggttgggtggcaatgctgcaacagtatttcgcgacggcgtggatcccgcataacgacggtaccaacaacttctatactgctaatctgggtaacggcatcgccgctatcggctataaatctcagccggtactggttcagcctggtcagactggcgcgatgaacagcaccctgtgggttggcccggaaatccaggacaaaatggcagctgttgctccgcacctggatctgaccgttgattacggttggttgtggttcatctctcagccgctgttcaaactgctgaaatggatccatagctttgtgggtaactggggcttctccattatcatcatcacctttatcgttcgtggcatcatgtacccgctgaccaaagcgcagtacacctccatggcgaagatgcgtatgctgcagccgaagattcaggcaatgcgtgagcgtctgggcgatgacaaacagcgtatcagccaggaaatgatggcgctgtacaaagctgagaaggttaacccgctgggcggctgcttcccgctgctgatccagatgccaatcttcctggcgttgtactacatgctgatgggttccgttgaactgcgtcaggcaccgtttgcactgtggatccacgacctgtctgcacaggacccgtactacatcctgccgatcctgatgggcgtaacgatgttcttcattcagaagatgtcgccgaccactgtgaccgacccgatgcagcagaagatcatgacctttatgccggtcatcttcaccgtgttcttcctgtggttcccgtcaggtctggtgctgtactatatcgtcagcaacctggtaaccattattcagcagcagctgatttaccgtggtctggaaaaacgtggcctgcatagccgcgagaagaaaaaatcctgattcggtgagttttcgctaaaataagggcggtcagttgaccgccttttttcttttcgtagggcggataagcaccgcgtatccgccacacaaagcaacaggaacatcatgagcgataatgacactatcgtagcccaggccacgcctccgggacgtggcggcgttggcatcctgcgcatctccggcttcaaagcccgtgaagttgccgaaaccgtgctgggtaaactgcctaagccgcgctacgccgattatcttccgtttaaagacgccgatggcagcgtgctcgatcaggggattgcgctatggttccctggcccgaactcgttcaccggcgaanatgtgctggaactgcagggtcatggcggtccggtgattctcgacctgctgttaaaacgcattctgaccattcccggcctgcggattgctcgccctggtgagttttccgaacgcgcgtttcttaacgataaactcgacttagcccaggccgaggcgattgccgatcttatcgatgccagttcggaacaggcagcccgttcggcacttaactcgctgcaaggcgcattctccgcacgggtcaaccatctggtggaagccctcacccacttgcgcatttacgtcgaagcggcaattgatttccccgatgaagagatcgatttcctctccgacggaaaaattgaagcccagcttaatgacgtgattgccgatctcgatgcagtgcgtgctgaagcacgtcagggtagtttgttgcgcgaagggatgaaggtggtgattgccggacgtcctaatgccggtaaatcgagcctgttaaacgcgctggctggccgtgaagcagcaatcgtaaccgatatcgccngaaccacgcgtgacgtgttgcgtgagcatatccacattgacggaatgccgctgcatatcatcgacaccgccgggctacgtgaagccagcgatgaagtggaacgtattggtatcgagcgcgcgtggcaagaaattgaacaagccgaccgcgtgctgtttatggtcgatggcaccacgacagacgccgttgatccggcggagatctggccggaatttatcgcccgtctgcccgcgaaactgccgatcaccgtggtacgcaataaagccgatatcactggcgaaacgctgggaatgagtgaagtgaacggtcatgcgttgattcgtctctcggcaaagactggcgaaggcgtggacgtgctgcgtaaccatctcaaacagagcatgggctttgacaccaacatggaaggcggcttcctggcgcgtcgtcgccaccttcaggcgctggaacaggcagcggagcatttgcagcaaggtaaagcgcaactgttgggtgcctgggcgggcgaactgctggcggaagagttgcgcctggcacagcagaacttaagcgaaatcaccggggaatttacctctgatgatttgctggggcggattttctccagcttctgtattggtaagtaagtcgtctaaatgatataaagggcactgtccgttctgggggaaactaactatcagaacggaacagcgcttgtttttttatgagcatcctgcaccaaaactgcctttactactggctggagcgactttcaacatcttgcagtcctgtctttacagagaacgatattgctttagccgattaagctcctcttgcggaaagttaaattcgtctattgctttccagaatagttctttaaatacaggattgccatttgccttgcttattacatatttgccttcattattcttcgcttccagttgcatcatcacatctttaagataattttcattttcaccaaccacaattttgaatattttcagccagagacccatatatatcatccgctttctctaccgcaagagagaatgacttcccatcaaagtcacgggtaaactgctccaaaatctcatcgaaagtgaacccgtgttgcaacgccaggcgaatcgccgcattcagatatacatcaatgacctgcttactcattgtcttatagctggcaacatacaaagagcaaactgcattatttctgctcagcgacaggagttctctcactacatctttatcattttcataatggctggctatcacttcagctgtctccatccaggcagcaacaatctccgtatgccctttcactatcgcagaatataagcctgatgccttcgtccatttgtctgatgctcccgccactttttctcttgctgccatcagtttcaatatatcttctttatttaattcatttttaaacattttggcttttatattggctagcaatatattaacaacattataatcattggttctaatagcgctatttaaatcatcaattgagtctatttcctttcctatacgaagaagtatttcatttttatttaccccaaattctttctcaaagtcatctatcgccaacaaccatgctttgacaattttattttgattatttttcaaagccctgggaatccagctcactccgagattatctttcgcaaggagtagagtttccaggtcctcttggctaaaattatattttctggtcaactcttntaaatttgttatgtattcattaaacttatcaatagtattgtgatacaataatacacataacccatatattccttcaggtgatttcgcagcaagaatatcaagagcctttgatgctgtcatttcttgagagttttttaatttatcgaaaaaaagaacaatgtttttatatatccccattctcattaatagaaataatgctggtggtgataatggaggttgcaactcattttcaataccacttaataaatgggcttgttcccgagggagataaggagttattcctacacactcggagcaaatatctgttattacccatttttgttttgcctgttgaatatttataaacgattgcaatgacccaaaagaatcacagttgtttgctttatagcgtactgcagtattggttgcattaggatcataaaaggatacaacatattctgtttcaccagcaggcgtttttttgatcctcaagcggacggccatagcgtgtgtttgagattgaacgattgccgtcatatgcgttaacttctctttttccattctgtgaaaaaagacagataatgcctccccaaacttatcactggcaacgacgcatgtaccgggtggtggatttttttgtagattgttaaattgctgctcaagctcgaaaggaatatgtttttgtatatcttccggagatgaatagtaagcctttaatggaactttccctgtatgctcattcattgaatctatacagtattgcagagcaaaatgtctacattctattaaactttttggttttccagtaaaatgcaacaggcaattataatctacaatatcatatttgctattagcttttatctgctcttttgtaaaactctcatcatcagggtacgtatgaaggcaagtaaaaatatcatccaggaattttataagcactggagatacggaaatatgtactatattgattgcgtctgcatcgcttacggttaaaatcataccttcaggttgttgcttagatctggagacaagaattgaatatgcaccatcgctatagaaacctaactcaacttcagaacaatgattaacaaaatgatttaacggcccctctttttcaagtgaataaactgaaggacttttaagatacgcaactatatcgtcaacgaataattgagatttatttttttctccatccaaatcaggcacgaaagaaggagattgtatacatactctgctgacagttacgttatcaaccattttctttcccctcatccatatgaaagttgtagtaataataaggttactatttaaaaatcaactatcaaatttcgctcatttatagagttatttgtctttttacgtcatttccccatcaggtcatcaacctggtaatgaggtgggtaaaccgcgacgtcaacgaggggaacagctccttgtaatggtatccctataatcaatatcatcatcttcaacaataatgataaaaattaaaaaaattatccattcacgtatttttgttaatattctttatgtgtcagttctcataaacacagccaataactaaatgtgattcgattcacatttaaacaatttcataatagacaaatttcttgagtattatactgtagcttcgtgtctttcgaggataagtgcattatgaatatcttacatatatgtgtgacctcaaaatggttcaatattgacaacaagattgtcgatcaccgcccttgatttgcccttctgtagccatcaccagagccaaaccgattagattcaatgtgatctatttgtttgctatatcttaaatttgccttttgcaaaggccatctctcgtttatttacttgtgttagtaaatgatggtgcttgcatatatacatggcgaattaatggatattgcagatgcaatattcacagggatcactgtaattaaaataaatgaaggattatgtaatggaaaactttaaacatctccctgaaccgttccgcattcgtgttattgagccagtaaaacgtaccactcgcgcttatcgtgaagaggcaattattaaatccggtatgaacccgttcctgctggatagcgaagatgtgtttatcgatttactgaccgacagcggcaccggggcggtgacgcagagtatgcaggccgcgatgatgcgcggcgacgaagcttacagcggcagccgcagctactatgcgttagccgagtcagtgaaaaatatctttggttatcaatacaccattccgactcaccagggccgtggtgcagagcaaatctatattccagtactgattaaaaagcgcgagcaggaaaaaggcctggatcgcagcaaaatggtggcgttctctaactatttctttgataccacgcagggccatagccagattaacggctgtaccgtgcgtaacgtctatatcaaagaagccttcgatacgggcgtgcgttacgactttaaaggcaactttgaccttgagggattagaacgcggtattgaagaagttggtccgaataacgtgccgtatatcgttgcaaccatcaccagtaactccgcaggcggtcagccggtttcactggcaaacttaaaagcgatgtacagcatcgcgaagaaatatgatattccggtggtaatggactccgcgcgctttgctgaaaacgcctatttcatcaagcagcgtgaagcagaatacaaagactggaccatcgagcagatcacccgcgaaacctacaaatatgccgatatgctggcgatgtccgccaagaaagatgcgatggtgccgatgggcggcttgctgtgcatgaaagacgacagtttctttgatgtgtacaccgagtgcagaaccctttgcgtagttcaggaaggcttcccgacgtatggcggcctggaaggcggcgcgatggagcgtctggccgtaggtctgtatgacggcatgaatctggactggctggcttatcgtattgcgcaggtgcagtatctggtcgatggtctggaagagattggcgttgtctgccagcaggcgggcggtcacgcggcattcgttgatgccggtaaactgcttccgcatatcccggcagatcagttcccggcacaggcgctggcctgcgagctgtataaagtcgccggtatccgcgcggtagaaattggctctttcctgttaggccgcgatccgaaaaccggtaaacaactgccatgcccggctgaactgctgcgtttaaccattccgcgcgcaacatatactcaaacacatatggacttcattattgaagccttcaaacatgtgaaagagaacgcgtcgaatattaaagggttaacctttacctacgaaccaaaagtattgcgtcacttcaccgcaaaactgaaagaagtttaattaatactactgagtggctataaggatgttagccactctcttaccctacatcctcaataacaaaaatagccttcctctaaaggtggcatcatgactgatcaagctgaaaaaaagcactctgcattttggggtgttatggttatagcaggtacagtaatcggtggaggtatgtttgctttacctgtggatcttgccggtgcctggtttttctggggtgcctttatccttatcattgcctggttttcaatgcttcattccgggttattgttattagaagcaaatttaaattatcccgtcggctccagttttaacaccatcaccaaagatttaatcggtaacacctggaacattatcagcggtattaccgttgccttcgttctctatatcctcacttatgcctatatctctgctaatggtgcgatcattagtgaaacgatatcaatgaatttgggttatcacgctaatccacgtattgtcgggatctgcacagccattttcgttgccagcgtattgtggataagctcgttagccgccagtcgtattacctcattgttcctcgggctgaagattatctcctttgtgatcgtgtttggttctttcttcttccaggtcgattactccattctgcgcgatgccaccagctccactgcgggaacgtcttacttcccgtatatctttatggctttgccggtgtgtctggcgtcatttggtttccacggcaatattcccagcctgattatttgctatggcaaacgcaaagataagctaatcaaaagcgtggtcttcggttcgctgctggcgctggtgatttatctcttctggctctattgcaccatggggaatattccgcgagaaagctttaaggcgattatttcctcaggcggcaacgttgattcactggtgaaatcgttcctcggcaccaaacagcacggcattatcgagttttgcctgctggtgttctccaacttagctgtcgccagctcgttttttggtgtcacgctgggattgttcgattatctggcggacctgtttaagattgataactcccacggcgggcgtttcaaaaccgtgctgttaaccttcctgccacccgcgttgttgtatctgatcttcccgaacggctttatttacgggatcggcggtgccggactgtgcgccactatttgggcggtcattattcccgcagtgctggcaatcaaagctcgcaaaaagtttcccaatcagatgttcacggtctggggcggcaatcttattccggcgattgtcattctctttggtataaccgtaattttgtgctggttcggcaacgtctttaacgtgttacctaaatttggctaaatccttcaagaagccagtcattcgctggcttcttgcctctcaggaaatcacttatgtccaaatggcaactcgcctgatcctccttcaccacgtatgctttgcgtcaccttactatcaggacgctttagcccatgtcccgctttttgatttgtagttttgccctggttttactttatcccgctgggattgatatgtacctcgttggtttaccgcgcatcgccgccgatctcaatgccagcgaagcgcagttacatattgcgttctccgtttatctggcaggtatggcagctgcgatgttatttgccggtaaagtggccgatcgttcagggagaaaaccggtcgccatccccggcgcggcgctatttattatcgcttcggtgttctgttcactggctgaaaccagcacgttatttcttgcagggcgctttctacaggggttgggcgcgggctgttgttacgtggtggcattcgccattttgcgcgacacgctggatgatcgacgtcgggcaaaagtgctgtcgttactcaacggcattacctgcatcattccggtgttagcgccggtgctcggtcatctgattatgcttaaattcccgtggcagagtctgttctggacgatggcaataatgggcatcgcggtactgatgttgtctttgtttattttaaaagaaacgcgccctgccgcccccgcagcttcggacaaatcacgagaaaatagcgagtcgctgcttaatcggtttttcctcagccgtgttgttatcaccaccctcagcgtttcggtgatcctcaccttcgtcaatacatcgccggtattgctgatggaaatcatgggttttgagcgcggagaatacgccaccattatggcgttgaccgctggcgtcagcatgaccgtttcattttccacgccatttgcgctgggaatttttaagccacgtacgttgatgatcacctcacaggtgttattcctggcggcgggcatcactcttaccgtttcaccttcccatgcggtttctctgtttggtatcacgctgatttgcgccggtttctcggtaggttttggtgtggcgatgagtcaggcgttagggccgttttcattacncgcgggcgtagccagctcgaccttaggtattgcgcaggtttgcggttcgtcactgtggatttggctggcagcggtggttggtatcagcgcatggaatatgctgatcgggattctgattgcctgtagcatagtgagcctgttgctgattatgttcgtcgcgcctggacgcccggttaccgctcatgaagaaatccatcaccacgcttgatctcaatctgctgctctgtctgcagctgctgatgcaggagcgcagcgtaaccaaagcggcgaagcggatgaacgtgacaccttcggcggtgagtaagtcgctggcaaagttaagagcgtggtttgacgacccgctctttgtgaactcaccgttggggctgtcgcccacaccgctaatggtcagcatggagcaaaatctggcggagtggatgcaaatgagcaacctgctgctggataaaccgcaccaccagacaccgcgcggcctgaagtttgagctggcggcagaatcaccgctaatgatgatcatgcttaatgcgctgtcgaaacagatctaccaacgttacccgcaggcgaccatcaaattacgtaactgggattacgattccttagatgccattantcgtggtgaagtggatatcggtttttccggtcgcgaaagtcatccccgttcgcgggagctgttaagctcgctaccgttagccattgattatgaagtgttgtttagtgatgtgccctgcgtctggttacgcaaagatcatccggcactgcatgaaaagtgggatctcgatacctttttacgttatccgcatatcagcatttgctgggaacagagcgatacctgggcgctggacaatgtgttacaggagctggggcgcgaacgtacgattgcaatgagcctgccggaattcgagcagtcactgtttatggcagcgcagcccgacaatctgctcctggcgaccgcgccgcgctactgtcagtactacaatcaactccaccaactgccgttggttgctcttcctctcccgtttgacgaaagccagcaaaaaaagctggaagtcccttttaccctgctgtggcataaacggaacagccataatccgaagatcgtctggttacgggataccattaaaaatctttacgcgtcgatggcataaccgaatcgtatgaaacgcgacccgatttcacaataaaatgtaaaaaagttgtaataagcttgtctgaatcgaacttttagccgctttagtctgtccatcattccagtaaatgattactcttgtattcataatggaccattaagcatggagcgaaaaatggcgactcactttgcccgagggattttaacggaaggacatctgatttctgttcgtctcccctcccagtgtcatcaagaagcccgaaacattccccctcatcgtcaaagccgttttctggcgtccagaggtttactcgcagaactgatgttcatgctgtatggcattggcgaattgccggaaatcgtcaccctgccgaaaggtaaaccggttttcagtgataaaaatttgccttcgttttctatttcctatgccgggaatatggttggcgtggcgttaacaaccgaaggtgaatgtggcctcgatatggaactgcagcgtgcgacgcgcgggtttcatagcccacacgcgcccgataaccacacattttccagcaatgaatcgctatgggtcagtaaacaaaatgatccaaacgaagcgcggncgcagctcatcacgctgcgccgaagcgtgctaaaactaaccggtgatgttttgaatgacgatccgcgcgatctgcaactgctgcccattgccggacgcctgaaatgtgctcatgtaaatcatgtagaagcgttatgcgacgcggaggacgtgctggtgtggtccgtggcggtcacgcccacgattgaaaagctcagtgtctgggagttagatggcaaacacggctggaaaagcctgccggatattcacagccgcgccaacaatcctaccagccggatgatgcgttttgcccagctctctaccatgaaggctttttcgccaaattgatagacaaccacaggagtcattatgtctgaaaaattgcaggtggttacgttactggggagcctgcgcaaaggctcatttaatggcatggttgcacgtaccctgccgaaaattgctccggcgagcatggaagtcaatgcgttaccttccattgccgacattcccctgtatgacgctgacgtacagcaggaagaaggttttccagcaacggttgaagctctggcggaacagatccgtcaggctgacggtgtggtgatcgtcacgccggaatataactattcggtaccgggtgggctgaaaaatgccatcgactggctttcccgcctgccggatcaaccgctggccggtaaaccggtgttgattcagaccagctcaatgggcgtgattggcggcgcgcgctgtcagtatcacctgcgccagattctggttttcctcgatgcaatggtgatgaacaagccggaatttatgggcggcgtgattcagaacaaagttgatccgcaaaccggagaagtgattgatcagggtacgctggaccacctgaccgggcaattgaccgcatttggcgagtttattcagcgagttaagatctaaataaaaaacccgccagcaatcatgcatggcgggtttttaacgcgctatcgattttagtgagcgtcgataaatacaatcttcaggataaacagcagcgcaacgatgattacgcacgggctaaggtcacgaatacgcccggtaccaatcttcatcacgcagtaggagataaagcccagcgcaataccttcggtaatcgagaagctgaacggcatcatcacagcggtaataaacgccggaacagattcagtaagatcctgccagttcacgcgagcaagacttgaggtcatcaacacgccaacgtaaatcagngcgccagctgcagcgtagcctggcaccattcccgccagcggcgacagaaagataaccagcaggaacagcagaccaacaaccactgccgtcagaccggtacgaccgccaaccgatacgccggaagaggactcaatataagccgtaacggaagaagtaccgataaacgaaccggtcacggaagagatactgtcgacatacagcgcctgcttcatgcgcgggaatttccccttctcatctgccagaccggctttatcggtcacgccaatcaacgtgccggaggagtcaaacaggttgaccagcatgaaagagaaaatcacccctgccagcccgaggttaaacgacccggctaaatctacatgacccacgacagtcattacgctcggcggcgcagaaacgatgccattgtagtggacatcacccagcatccagcccagcagcgttgtcaccacgatagaaaccagcaccgctgcgtgaatgttgcgtgaggccagaatagcaatgatgaagaagccgaggatccccagcagcacgctgtgagaagtcagattaccgatgctgaccagcgtttccgggttagcgacaatcacacctgcgtttttcagccccatcatgccaatgaacagaccgataccgctggtaatgcccacacgcagactcaccggaatgttggcaatcatccagtagcgaacgcggaaaatcgtcagtaacagcagaccaatcgcgccccagaagattgcgcccatcccgacttgccacggcaagcccatcgcctgcacaacgacaaaagcgaagaacgcattcaggcccatagcgggtgccagtgcaactggcaggttagcaaacagccccatcataatactgccgaatgcagcaatcagacaggtagtgacgaagacggcgctggtatccatgccagcaacgccaagaatttgcgggttaacaaaaacgatgtaaaccatcgtcaggaaggtggtaaaaccggcgatcacttcggtccgtgccgtcgtgccatgttcgcgcagtttaaacacgcgttccagcatcccctggccagaagcctgggttgtgtgttgttgactcattatctatttccgaacaaggagggaaaatccgtcgctatcgtataccaaaatgagacaatatggacggctgaagataacttttttcattgtatttgcttatacggcaacgattgcgtcatgcgaattggcatgacgaaaacgttaaactaacgataaaggaaagacatgtcccagatagaagcggtatttttcgactgcgacggtacgctggtcgatagcgaggtcatttgctctcgcgcctatgtcacgatgttcagggaatttggcattcacgttgacctgaaagagatttttacccgttttaaaggcgtaaaactctacgaaatcatcgatatcatcagtaaagaacagggcgtgacgatggtccaggccgatgccgagcacgtttaccgcgcagaagtagcacgtctgtttgataccgaacttgaggacatcgcaggagcgaacgaattgctggcgagcattaacgtgccgatgtgcgtcgtctctaacggtccggtcagcaaaatgcagcattcgcttggtaagctcaacatgctgcactacttcccggaaaaactgttcagcggatatgacattcagcgttggaagcccgatccggcattaatgttccatgcggcaaaagcgatgaatgtgaacgttgaaaactgcattctggtcgatgactccagcgctggcgctcaatcagggatagatgccggaatggaagtgttttacttctgcgctgacccgcacaataagccgatcgttcacccgaaagtcaccacctttaccgagctgtcgcagctgcctgcgctctggaaggcacgcggctggaatataacgcgataatcgcctccttacttcaacacttacacatcagtcacgctggtttgagatacagaacaccaggtgtctgatgagtaagcgtctattccctatgaataatttatgtcgttattcgtcctgtcatccaccctctgtatggttaagcctgggttatattttgtacaatatcgggataccgttcgaaccaatccagaatattacgcatcgcgtcactgatgtttttatcgtctttatattgattctcaagtctattatttcgaacaatagtaagcttagaacgtattttatcatcacaatcgacaattttcgcattcaatgcatttacttcatcctgcacttctatactattccaattgtcccttttgttatcaaataaagtccttttatcctctaatgatttattacgacttatgattaactctttaatttctcgcaataagtcatcgtaatctttaatggaagctcttatttcctgatagttttttagtaaatcctcccagttaattgcaaatgcactggaaaaatagtaaaaatcgcgagcacacttattgagccctgagtcgtaatctgtcttaaacgattttatatgttccagttggtttgatagtgctttaatttttttttcttcaacaccttcaaaaatgggtgcaagttccttataatcaaatgttacatttgtagcagattctttatgagactcctttatttgcttttggacatattcttttggattttcagtaagtattgttccatctggcggcggaatcattttatttattatagattcaacaaacttaatccggtcactttctatcatattgttaatgatattttgtgcattttcctgcatatctttaaaaataaaaaactcaaccctactattatcaaaatgatatttttcctcgtacgatttattttcaacataaagtgttgataaaaacgactctaactctaaaaatgcgtttttatntttttccttagtctttgactcggaattataaaaatttattacatcgatattgatagcacttaccttttttaagaaatcaggtatttgttctttacttatagctccgtccagatccatatacatgtatttttgcgctgtaagaccatcttttgaataatttgtatttggatcaatagcacagtctttgcacctatctccactgtaataatagcctaaatttgccccaatcaaattactatttttaaagaagacattattgttctctgtatttttcttgctaaatgaagaatcggtccctttctttatactctctacgcatttcgaaaaattatcatctaacttaagatttctcgatcttctttcaatgtaatcagaaaaatactctttggggttaaacatagttctatctgaaccatcttcacgaagaccatcgtttattttaatatgcttcaaattacaattataaaacacagtccccgtatccggccccctgatttcatcataattagacttgttgaacgaatttgccaaaaaatccattccatgagcatcaagccctattatattacagttataaaaatgactcagaagtatactcgagccaggacaacatcctccctggattatacaatcctgaacgaaagactgcataaagagataagaacctaatttttcttgaatactatcaggttgtgtaacggtgtagattttagacgtctcacatctataattttcaattttgcatttagaaataaaacaacctttaaacataccttttattggttttttatttcctgattccacagtatcatcattagtctcataaagctgtatgttgttgaatttacaatcatcgaaatagcaattttcaaaaaccggaccttcaaggttagggctgtttatcactcctgaaaaaattacattcttaaaactacaatattttaatgaatttaaaacatccttagacaacgatgataaattgattgttgtattaataataggaattttatttttaatcagcgtcgcaagttttacagaataattatcaaacgttaatctcaccaagggagaattatcaaaatgtaaatcatcgagataattatcaagcgttaatctctctgaagaaacctgttttttttcgttatcattcgaagtagcccccgtgtagagattaaaggatctactcacaataacttcattattttcatttgtggtaaagtctgtcttagtactaaatcgccattgttgttctttttttgccagagatttaatcttatcgaacacctcggctttattatcaactttcgtgacaaattcgtaaattaagcctttgacttctttaatatgagagccaggaaaaagatcgcgaacaaactcccacagtgtacgttttttaaataaatcccctttgccatcaagaatattttcaatatccttagagtttacattatatttcttatcattaatacttaaagcaattttatcagaatagcctttatgactaagcctctccttatacattgcttctaaaaaaggattagtattaacaaaaacatctggttttaatttagcgaccataaatcctccggcgtgtaatattgagttgtttgaaaaacaataacttctatgttgttaattaactgtactgctagttaggttagcaacaagtgttacttatattaccggtgaatactgtaaaaaatagctcattatttccattttaacccagggtgttcaccctggatttgcaattttttgggggttaacggtacattccacgggttaaccgcagcatcagaaaatg

SEQ ID NO: 1596 - DNA, 2035 bp, Escherichia coli
  Strain O55:H7
  modified_base (315)..(316): a, c, g or t
  modified_base (941)..(944): a, c, g or t
  modified_base (2033)..(2034): a, c, g or t
atagccgcttttattgtcgaggttaaaataaagagattttattaaattttatcaaggtgatttatggataatcttattggcacaccaccaaaccacgcagttccccataactatatagacatggagcaaatggaatatttatgtcatctcaatcgtttttctaaattgtctgacgattttttaataaatggtccaagagaggacctttttacatataaatatgttttagatggttcattttcaaatttacagcatttacttcctaaaggacaactacagaagatacaacagagattaagttctcttatgcataannacatgtttcattgttttcatgtttttttattaaaactatgctcaattgagagtattcctctcccaaatgccgattacgctttctttgatgacgaaatgccatttacattaactgatgaacagatcgaaaatatttcttttttaaacgcatatcacaaagaaaagaaaggaaacaacgacattgttacatttgatttcatgagcgctgatcaccactataattttagcacaaccatagctttaacaaatgatagcttccatatatcttcaataaacaaccataactcacaggttatattcgatgaaaacatccatttacatccctatgaattaccagaatcatcacaatggtgttatcagttaataaaaaacatgatttctttacattgcagatataataacaatttcaagataaactaaaccttttgttttgattttaaaaataaatctttttgtaatgccaggttgcaatatataacgtttattgcatgtttattttcacatgcaaacatgaaatattcgacatttcatgatgttaaccttgatatgtgtgagataaagaattgcaattttgacaattcagagatgaatttcatttcgtgcgtcgggacaaattttagcggttnnnnatttaacaatgtaaaaacaacaacagcgcaactaattaagacaccaacaaagtggacgaataatactctaaaatattggttctccagttgtaataaacgtaatatcatcttcacttttaatacaatatctgatagaaatatgaaattaaaaggtatcaaggatatattactgtcgttggttgaccaaaaagtcaatatttatagtgtaaggcaagagcttctggattttcttaataatgatttatataaaaatgatggagagattctctcttataaagaatcaataatgttgttttgtgctgaatagccgaaattagattattcagattaactaccgcactctatgttgtgtttatatccatgtaaggaaacaggtcatttgtgaatcctgacaccagactatgactatcgcccagggataatccacaaccgctggaagcagtctcttttcagttggataaaaccgtaaagtgcgattgcgataaataataaatacaggcttattattccagtcttttttattgcgttggttgattcaaatggctcggttagtaaaatgcaccattcactcggaaaactcaacatgttgcactcttatacgccgtatggaaaagacgtaggagtggtataaccatttaatcgtctcccaacgtcaacgcttacacatcagcgacactggtttaattaaagcataccagatttctgatgagtaagcgtcttttcgtataacctcattgtcataggaacgacttgatccgtttatttattcgccatgttattcagtatcaattttcttaatagctttcaccatattttgattttcttttagccaagtcctgatattttgaactacatcattaagtgtattctcttgttgatactttatcttgaatctctctgtttcagagaaaagatcccggattgcattatctatttcttcaatttttttatctattttctttatatcattttcgattttgactttttcatcattatcatttaaattaagcatcttctcattaaaataaacctttctttctagctgagcatctcttgtgccagaaaggttggctaaatcttgaaatttanna

SEQ ID NO: 1597 - DNA, 821 bp, Escherichia coli
  Strain O55:H7
  modified_base (3)..(3): a, c, g or t
atnattattatttctatcaatgacccccaataaatattgttcaatgtcaaagaatgaagcaatttcatgggctacatttgctggtttttctatatatttctcttggtttatttttttcttctgccttaaagtttttcaccgttaaaaaaagatttttcttttccaaaaatttctcctttgtaggcttattcttattctcataatcgtagtaaagtacttgcaaaccagcaaaatcaaagtaaaatccattaccatttggattggcagtacgatatgttttttcatttccattttcatcgtaatgtctataccaataaaggttattatagattttatgcatgaaattcactttatcagtatctatttcactagctatatctttttttctattgtacaaaacattatctataatatattttataatttcatcattgagttgaaaatcttttacatcatcaccaggcataatgttatgcagattaactaataaggattgtaaatcggctagtgcctttttgtaattattcttcatattattgctatatttataaatatcttctatccgtgaataaatattcgttaccttttccatgaaaggtaaaatgtctttttcagctatagctcctctatggtacatataaacaggaattttaacctgagtgtttgcagcaagattaccacttaagatagtggtatgagtatcaatagcacaatcatacaagggattcccaccggttaactcgcccaaacaagcagcatataaacagcaatgattaagatttaaatgtttatctatatcgtcttttatattataatgagtt

SEQ ID NO: 1598 - DNA, 1230 bp, Escherichia coli
  Strain O55:H7
tttggaaaatatcatcgtggataaaagttaaaagagctttatccagattaagtttatttttattttcactttctccgaaatattttcttggatcataatctcgtaaatcttcacgaattccatctcgtttgcatgtcatattaacataacgaaaatcacaatcataaaaattattactatctctaaaaccaccgcgagtttttccataaaacgaagttcctatgaaatccattccaacaccattaagctttgctatattgcaagataataaactgcttgcaataacacttgcttctttacacactccatcttgaagattacttgcatatacaaatgactgcataaacagatatgcaccgactttcttatcccctctttggggatcttgatttatagagtatatttttgatgtctctatcttgaaatttttcatttcgcattgatacaaaaaacaccctttaaacataccgtaaatcggtattttattatttggttttacgttacaaagaacgtcatagctttcacaggtcactttatcaaagccaacaagggacacattctcgaaattacattcctcaaaaaaacaattttcaaatactgggccattaagattttcgtaagatatattacctgtgaatgtcatctttttaaagcaacactgttttagcgataccagaacatcttttttcagtgcagataaatcgattatcatattttcaaaggggattttattttttaaatatacgcttagtttttcattatcattagggaactgcattttcaatatccctgattgaaaagccttctcatcaaaatgaatatcatgtttataactattataattgcgttcttctgataatacagaacgcattgtattttcttcagcattattatgattatctttcgagttaatatttattttaaatactctactaacaataatctctttattctcatctactgtaaattctgtcgtcgtactaaagcgccatttttcttctggagtagcgagagatttaattctctcaaatctcttaactttgtcctcagttttcgttacaaattctacaattgtttctttagcctccttaatatgatacatgggaaagagatcgagtataaattcccaaagagttagtttaagaaaagattgtctatcaccagctataaggtttgttatatctttatgggttattgaatacttctcctcattaccaacagacaaacaaa

SEQ ID NO: 1599 - DNA, 11678 bp, Escherichia coli
  Strain O55:H7
  modified_base (2579)..(2579): a, c, g or t
  modified_base (7224)..(7226): a, c, g or t
  modified_base (10844)..(10844): a, c, g or t
  modified_base (11029)..(11029): a, c, g or t
tttttgcaatccattattttcatctggcattttagtcagattagcaaatttatctgtaactgtactatatgatgatatagccataatcatttctcctgaacacaatatttattcgcccgagcataatacattgccgatttgtcttaaaaagcatacctgggtgttggtttgctacgattatgactaaaccacctatgaatactgtaaaaaatcgctcattttttatgtctcgatatagggcttttaccctgttttttgttttcttttccattctatgtgcaggtagcgatataaatgaaaagaataacaaaaatgtttttatagcgaggcactacgttaaaagtaaaataattcaaatgaaataatgtatatgcaatgtactggggagagtttcgaggtgagtttgtgtggcaatatttcagtgagaaagtgtatcagcccggtaactatgtatgaccgggctgattgccagatgcggcaaaaagctttatctggcctacagttagcactactctttggggtcttttcccgccagcagtttatccagctcatcaccgcctacatgacggaaatcctgacccttcacgtagtagaagataaactcacaaatattctggcagcggtcgccaatacgttcgatagaacgcgcacagaacagcgcggtaagtacactcggaatggtgcgcgaatcttccatcatgtaggtcatcagttgacgaacaataccttcgtactcctgatcgacttttttatcttcacgataaatacgtaccgcttcgtcaatgtccatccgcgcgaacgcgtccagcacgtcgtgcagcatctggatagtatgacggcccagcgactccagacttaccagcaacggctgatgctgctgggagaatttctccagcgcagtacggcagattttgtccgccacgtcgccaatacgctccagttcggcaatggttttactgatcaccataaccaatcgcaggtcgctcgccgtcggctggcgtttggcaataatgcgcacgcaggcttcatcgatcgccacttccatcatgttgacgttcttgtcgccttcgatcacgcgcttcgccagatcgctgtcctggttatgcatcgcggtgattgcatcagaaagctgctgctccaccatgccgcccatggtcatcacctgcgtgcggatactttccagttcggcgttgaactggccggaaatatgtttattaagattgagactgtccataacgcactcctgaatcaaccgtaacgaccggtgatgtagtcttctgtttgtttcttcgctggcttggtgaacagatcgtccgtgttgctgaactcaatcaattcgcccaggtacataaacgccgtgtggtcggaacaacgcgcagcctgctgcatgttgtgggtgacgatcaccacggtgtaatcctgcttcagttcggtgatcagctcttcaatacgcccggtggagatggggtcgagcgccgaacatggttcgtcgagcagcagcacttccgggcgaatggcgataccacgcgcaatgcacagacgctgttgctgaccaccagagagagagtaaccgctctgatgcaatttatctttggtttcgttccacaatgcggctttggtcaatgcccactgcacgcgctcgtccatgtcggcacgagagagcttctcaaacagacgaacgccaaaggcgatgttgtcgtagatggacatcgggaacggcgtcggtttctggaacaccatgcccactttcgcacgcagcagggcgatatcctgagagttggtcaggatgttgtcgccatcgagcagaatttcaccttccgcacgctgttccgggtacagttcaaacattttgttgaaggtacgcagcagcgtcgatttaccgcagccggacggcccgataaacgccgttacctggtttttggcgatatccaggttgatgtttttcagggcatggaatttgccgtagtagaagttcaaattacgaacctgaattttactcggggcagtttcaaccatactcattgcaatcttttcctcatcgtgcctgatgcacttcgcgaatcaggcttaccgtaggccggatcaggcgttcacgccgcatccggcaaagtgttaaccgtgtacagagtcaaaaaggcgctcggtcggtcccctcgcccctctggggagagggttagggtgaggggaaaaccgtgtcagcaatatcaaccgtgtttattcttcgcgaaaacaacgcgcgccagaatgttcagcagcagtacgcacagggtaatgatcaataccccggcccaggccagttgctgccattccgcaaacgggctcatcgcaaacttaaagatcgtcaccggcaggttggcgatcggctgcatcatgtccgtgctccagaactggttggagagcgcggtaaacagcagcggcgcggtttcaccagcaatacgggcaatcgccagcaggataccggtcatgatcccggacaccgacgctttcagcgtaatcgcggagatcatcttccacttcggtgtacccagcgcataagccgcttcacgcaggctgtccggcaccagtttcagcatgttctnggtggtgcggataacaatcggcacctgcaacaacgccagcgcaatcacacccgcccaaccggagaagtgctccatctgcgccaccacgatggtgtaaacaaacagaccaaccacaatcgacggcgcagagagcagaatgtcgttaatgaagcgaatcacttctgccagccaggatttacgaccatattcagccagataaatccccgccataatgcccagcggcgtaccgaataccgtggcccacaaaattaacagcccgctacctgccagagcgttcgccagaccaccaccttccgtattgggcggcggcgtcatttcagtgaacagcgccagcgacataccgtcgataccgcgggtgatggtggacattaaaatccagatcagccagaacagaccgaaggccatcgtcgccattgagagcgtcagtgcaatacggtttttgaggcggcgacgcgcctgcattttgcggcgggattccgccagcgccgcagtggtttgcatttcaaccatagccattagcgagccccctcattcttagccaggcgcataatcataaacttcgatgcggcgaggacgatgaaggtaatcacaaacaggatcaggcccagttccatcagtgcggcaacgtgcagaccggattccgcttcggcaaattcgttcgccagcgcagaggtgatactgttgcccggcatgtacagcgaggcgctgtcgagctggtaggtgttaccgataataaaggtcaccgccatggtttcaccaagcgcgcggcccagccccagcataatgccgccgataacaccatttttggtgaacggaagaacgatacgccagataacctcccaggtggtgcagccaataccgtaggccgactctttcatcatcaccggggtttgttcgaacacatcgcgcattaccgccgcaatgtacggaataatcatgatggcgaggatcacgcctgccgcgaggataccgataccaaatgccgggccagagaacagcgcgccgacaatcgggatattcgacatgatattgccgaccggctcctggaagtaaacggcgaacagcggcgcaaagataaacaggccccacatgccgtaaacgatacttggaatggctgccagcagctcaatggcgatacccagcgggcgtttcagccagccaggcgcaagctcagtcaggaacagggcgataccgaaactcaccgggacggcgatcagcagcgcgataaacgaagtcaccaacgtaccgtagatcggcaccagcgccccgtagatatcgttcggcgcatcccactctttggtccacaggaaagccagaccaaatttctgaatgctcggccatgaggagatgatcagagagacaataatgccacccaacatcaatagcacaatcagcgccgccagttttaccagcacgctgaaaattatgtcgccctttttacccggtgggttaaaagcaggcttggttgcagccataagttactcttcagttaaacgcgtttacaaagtcattttgtaatgccggataagccgtttaatgccttatccggcctggagttttattagtacagcggcttgccgctactgtctttaatattggtcttccacgcagcgcgaacctgttcaactacgctatccggcaggctggcgtaatccaggtcgttcgcctgtttagccccggttttgtacgcccagtcgaagaatttcagcacttctgtgccttgttctggtttcttctgatctttgtggatcagaatgaacgtggtagaggtaataggccacgcatcttcgcctttctggttggtcagatcctgagcgaaggttttgctccagtctgcaccttttgctgcattagcgaagttttcttcggtcggcaaaacaggtttaccatcagcggagatcagtttggtgtacgccaggttgttttgcttcgcataagcatattcaacgtaaccaattgcacccggcagacgctgaacgaacgcagcgataccgtcgttacctttaccacccagaccgatcggccattttacggtagagccagtaccaacgttgtttttccactcttcattcactttcgccaggtagctggtgaagacgaaggaagtcccggagccatctgcgcggcgcactacagcaatgttctgtgaaggcagtttcagacccggattcaatttggcgatggcttcatcatcccacttcttgattttgcccaggtagatatcgccgagggttttaccatccagcaccagctcaccagacttcagacctggaatgttaaccgccagcaccacgccgccaatcacggtcgggaactggaacagaccttcctgagccagtttttcgtcagacagcggcgcgtcagaagcaccaaaatcaacggtattggcgataatctgttttacgccaccggaagaaccgataccctggtaattaactttattaccggtttctttctggtaagtgtcagcccatttggcatacaccggcgcagggaaggttgcacctgcacctgtcaggcttgcttctgcaaacacagagaaagcactcatcgataaggtcgcggcgacaacagttgcgacggtggtacgcataactttcataatgtctcctgggaggattcataaagcattgtttgttggctacgagaagcaaaataggacaaacaggtgacagttatatgtaaggaatgtgacagtttgatgacacccaaaggaaagttattacttattgatattgaaggggaaaaatatcagcattttttcatgaaaggagaggaaatatgaacggctgtcataaaacagccgcaaaaggttagtttacaaattcaatggttaaggtcgcggtagcgttaaaaacgccgggctgaggccgggcaccggtaaagctggcaggtgctgccgaaaaagttaccgaaccatttttacgaccaaaaatggtcgtgttgcccatgtctgcgggtaacttgccgttgttgacgctaacttcagcattcgatttattgtaaattttgatcccgacatcagcattgtctgtcgccaccatcgtatcgtcactgcttcggttcgtccccgtaaaagaagcatcgactttctgcgtacgctcataccccatccccgtacactcaatactcactgttttagtgatttttcgtgaagtaatggcttgcccggcggtagatgaaaattcggacgcaggaatagtatcaaaatcaaaataaatcacctgtcctgcatttatctgacaagactgtggtgcggtcaaactgcctgaaattcgaacttttgcaatcgcctcaccacgggtcgtggtgctggatatgttggcatacagcaatgcaatatcggtgataggtattactaccgttccatttattgaacgtttaatacgaaatgaaatcttcgcatctgctccagttttcaggctcacgccaaccgctgtagttttgtttccctgacaagtgtgatctgttgtagttgcctggttggaaacatgttcaaaaggaactgccgtataccccgcatttagcacagatatttttgttcccacatcgacatattcgttaagatagtaaaaagcaagaccacttgcggtggtgctataaaccataccgggagcagggtctgcggtataatatatttcgtgataagcgccattgctatgttttgaatcacagttacacagaacgctataattttcagaagatgttgcattagcaatatctattaatgtatttccaggcacattgtttgctgcactgaccgttgtcagaggaaaattaaggcttaatgtatgtgtgccgcctcttgttgcacacgtgccatcatttgccgcatacccgcacggtaaccctaaatgaaagagaattatgcaaaatatataatgccattttttcatgaaattattccttttactaacacaagattagttagtaaattcaataaccagcgtggctgtagcggtaaatccattatcaggcgctggttttgcgcccgtcagactggcgggcgctgaataaaacgttacgctaccatcggtttttcctaatcgactaatagcacccatatcagcgggtaagttgcccccatccacattcactggacggtcgttcttatcaaaaatcttaattcccacatccggattactcgtcacgatcatggtggcatcggcacttctgtttgccgcaatcatcgacgcactcaccacctccgtggaccttacgtcttccatcctggtacaggatactgtgacttcggttttaatctttctttctgcaataattgaacccgccgttgaggagaactcagcgctattaattttttgaaaatcgacatcgatgctctgatttggcgttaactcacagttctgcggggccgttagttgtccgcgaattgtcactttagaaacgggggtcgttttgggaaaatgatcggacatgcccgcgtacaaccaggcgacttccgttgtgggtattgtcaccgtgccagtaatagaatgccgaacatagaaagataattttgccgagcgccctgaatccagatttacagtgctcccattattacctgctccacaggtatgttgcggtgaggtggattggttggataagtgttcaaaaggaatggccgcatattggttattaataatannnatcgtcacgccgaccgataaataatcattcagagcatagtaatttaacccattaagagtgcgctcaagcacaagccccggtgcggcatctcccgtgtagaagataggaaaaaatgctgtttgttggcccggtccgccatgcgtgtcatcacagtgacagcgcaccgggtatgttccagtcgtgttgctcagtgcctcgaaaatattgtatccggagtggttattcgccgctgccaccgtcagcggaccaaatgataaatttgacatgtgcgttgcgccatcacyattagcggcgaaaccataaggacagcaaagcagcaaaatcaaccctgataatatttttttcattcatgcttcctttagcgacaaatcgcatccatttgaaccaggctggtatcatcaggtttatgggtgatgtgataggccgccttacatttttcatccgcagcttgtccccaactcaataaaaactcgcctttttcaggcatcccggagagatacagttcgccgttatcaccgacaatcccggtgactgtgcccgtttcgagagaggcggttgccatcgcgccaaacattattggtttaccgttgacctggcggacgttaaatagcacgcgataaccgacatgggtgacaaattcggctttcaccaccgcaccgcgcgttggtaccaggttgatgacggtgttttccagttcaatattggctttggagaaatagtcgctgttcaatgccacgcggttttcgtcatacgggctaagctgcgtttttacggtataaccacgccagtcggtagaaatcccggtggcgttttcaatggacaggccttctgcgcccggcgctttgaccaatgccaccgtttcgcccagttcctgcgagaaggtcactcagtcactatgcaccagcacgccgcctctggcgccataatcaaaatgttgggagtcacggctccaggaatagctaccattgaccgagccataagtcccgtcataggtcattccggcattgccgctgtaggagtcatcaggagagtgcatccacgattcctgtacgttataagacaggttacgcccttccagcatcgttccgttcagaccgacctgcatcgtgctttcatggtggttgttttgcgttaacgaatagttgacgtagctgtcttccatccagcacgatagcggtatcgacattgagaacatgaaaatctgttctttgccgaaatcatcattgttatcatcatgatggttgcccgatgagcgcttgatcgagtccgtatagttccaggaaacgttccaggagatgtttcgccagttgttgttatagccgaactgtaataaacgttcgacctcatcggtctgccagtattcctgtcgactgaatgttaaataaatattgccccagcctggcgtgaaagattgcgtccaggtgccttcgaagcggctgcgacggttgcccgttacccagaaatcagaatcattatcctgtcgcgacacccattcattgagggtgtagaacccctccgtagagtagcgataacccaccagacgaaaggtggtattggtgtcttcaaaacgtttggaatagagaaaacgatacgattgaccactctcattatcgtcgtagtcaaactgcgagcgggcatgagtcacgtcaaaagaaatcgcgcccagcgcccccatatctttaccaatacccagcgcggcagaagcgtaatcatttgccaattgtgttccgccatacaaagttattcccaaagggaaaccgtgcattgcttgtaactgcaagacctcaggcgtaaagccgctttcgtcgcgcacttctccaatgctaaggtctacatcggtctgaccttcacgcttgagaatggccagtgaagtaaatggctgaataaagtgctgctcgctgccatcttcttctttgatagtgacatcgagatcgccgccgctactggtcgtgtttaagtcggtgagggcaaatgcgccctgtggtacggctgattgataaataacgtagccgttttgtttgatgatcaccgtggcgttagttttcgcaatcccatgtaccactggcgcaaagccgttctggctggagggcaacatatcgtcatcggtatacagccgcacgccacgcacctgtgtactatcaaatacatcgcttgccgtccaggtatcgccaatcataatctggctacgtaatgccatgatgtcgcgctgaatgtaattactgacggaatggtagtccacattaccgtcataagaattcagggtgctgtaattacgaaaacgccatgcgcctaaattaataccattacgcaaattcagataataactgtcatcgtcgtcgtcataatttgaccggatggtatgcgatgccgaaaaatcataattcatcatcatggcattgatcccctgatcccaacgggaagggctgatataaccattaactgcattgttgagataaatttgcggaatagtaatattcaatgcaagtttactggcgtccagtaaccaggtagccccgtcgatcagcggaactggatttacgcatgttttgtcatcaacattcgccagagattttatcgcatcaacttttataccataggtcgccagcacgttttttatcgccacgtagcatgggtggagttcagcatcagggttatcctgggcgaatttaacttcctggcgttcgaagagcatgccgttgatcatcacatcaactttgtatgttcccgcaggtaaggtattcgaacggttgaactggtgaatatcaatattatccgcaggatgatccagttccagtaatctggggttgaacaagctatcccgggcaaaagcagatatggaacagagcagacatatgcccgatgcaagcgtaatgaaaagatgcgaagaggccatcgatatatccttatccggcgcttaaaggtttttctttagtggttgactaattgcaccgtaatcattaataaagcgccaaacgagcgattttcctgccacgccagccggaattggtaatgtcaatatttcaaaagggcggatcatatttagcgacacgtctttatcatccaccgtcacactcattacattaatatggatcggatttggattttcgacgatgagattattaccctgccgcgaccatttaacatttttaatagcctgctcagggattatctttaccgcggctggtcgccagaataacttaattcttgtttttatggctatctcaagaacattggtatttttttatcaattgaaggagggatgtttttcacgttcaaccagaatacggactcccgatcttttggtaactcgccagccgtttttaaaatgcgtaatattttctcttgctgtggttcaatgcgagaaacgggaggtatcacagaaaatggcggtttgcttttatcctctttattaaatggatcaacccatgtctgcaatagataaggaaggttcgtttctttattaaaaatagagattgtggtatcaggtttgtcaccataaaaaataacgcgagttcccccaacaacaataccagccgtagccatcgacatctgcgtaatcaaagtaacagcaaaaaacaatctaagtaaatacataggcataaatgtatctcataaaanatataataatgacgtccttcatttaagtaaaagagaaccataatggcgagcgccattttatttaaggtattatgttaagaatgatttattttatatattcaactgtaaactgcgagtcggcgttagctgtaccagggtcaatagtcgtttccgtagcaatataacgagccatgaacttcatggangcattaccattagaaatcggagttgatgcagaattttcatataacttgacctgagtgttatctgcacggttatataaacgaatagctacgcctttcgctgcactaacggcacccgcaccagtataatccccactgttatcactcgggctaataccagcggcagcatcgttagagttatccagcggggtaccaattgccaggttgccattaccatgagcatcttcattaccatcgaaacgaattgcggcggacttaaaggtttccgggcattgagtcagatcgatagaaaaagccgtcggggcagccacatcatcgacgccactaaaggctgtacggtttactttgcctaagtcaacgacctgatctttagtttcaggagtgacttcgcaagtactgtcaataatttcaccacggaaatggactgttccatcagccgcctgtaggtgacctgccataaacacagaagttaacgctaatgctcctacaatcatatttggtttcataaatataactccattaatttgatattattcctgtgtgttatccatttattaaatttggataaacctgatcggtatttgatcagaaaccaaatagtactaccaatatactttggcgcaagtggtttttattttatacatttagataa

SEQ ID NO: 1600 - DNA, 9498 bp, Escherichia coli
  Strain O55:H7
  modified_base (741)..(744): a, c, g or t
  modified_base (2702)..(2702): a, c, g or t
  modified_base (2742)..(2742): a, c, g or t
  modified_base (6121)..(6121): a, c, g or t
agcaaaactaaatttatatcgttatgtgattgcttaaaagaagagggaataataaatggatataaatattatttttatgatgaggtgattttttaattatatcacacatctcaaagcagacaattttttcatatttacataatccacaactatgaattcgcgtagaaaacagtcttatttttagtaaaccacactttcaaattatattttttgcctatatttgtggaaagactatacatttacagtgataatttattatcacacattgttacatagttaaataaaattacatattgatgattgttttacaagcgattcttgaatgaacaaaacgtgctattcattacaaagtacatcaattatggcaattgtttgtcaatgattcgaggtatttaattactactacggttaaaacaagtgttcaacggtgccccaaataatagctgaagttaattatatggaatgaggttagattattaatgctggtaagtaaaagggccgccaaaaggcagcccttcgttcagcaaatgaataatattactcaaccgttaccgattttgccaggttacgcggctggtcaacgtcggtgcctttgatcagcgcgacgtgataagccagtaactgcagcggaacggtgtagaagatcggtgcaatcacctcttccacatgcggcatctcgatgatgtgcatgttatcgctacttacaaaacccgcatcctgctcggcgaagacatacaattnnnngccacgcgcgcgaacttcttcaatgttggatttcagtttttccagcaattcgttgttcggcgcaacgacgataaccggcatatcggcgtcaatcagcgccagcggaccgtgtttcagttcgcctgcagcgtaggcttcagcgtgaatataagagatctctttcagcttcaatgcgccttccagcgcgattgggtactgatcgccacggcccaggaacagcgcgtgatgtttgtcagagaaatcttctgccagagcttcaatgcgtttgtcctgagacagcatctgctcaatacggctcggcagcgcctgcagaccatgcacaatgtcatgttcaatggaggcatccagacctttcaggcgagacagcttcgccaccagcatcaacagcacagttaactgagtggtgaatgctttagtggatgccacgccgatttccgtacccgcgttggtcatcagcgccagatcggattcgcgcaccagagaagaacccggaacgttacagattgccagcgaaccaaggtaacccagctctttcgacagacgcaggcccgccagggtatccgcggtttcgccagactgtgacaaggtgatcatcaggctgttacgacgcacggcagatttacgatagcggaattcagaggcgatttcgacgtcgcacggaatacctgccagcgattcaaaccagtaacgggaaaccataccggagttataagaagtaccacaggcgaggatctgaatatgctcaaccttcgacagcagttcgtcggcgttcggtcccagctcgcttaaatcaacctgaccgtggctgatgcgcccggtaagggtgtttttgatcgcgttcggctgttcgtagatctctttctgcatgtagtgacggtaaatacctttatcgcccgcgtcatattgcagattggattcgatatcctgacgttttacttccgcgccagttttatcgaagatgtttaccgaacggcgagtgatttccgcaatatcgccctcttcaaggaagataaagcgacgggtcaccggcagcagcgccagctggtcagaagcgataaagttttcacccatacccagaccaatcaccagcggactaccagaacgtgctgccagcagggtatccgggtgacgggagtccatgatcactgtaccgtacgcaccacgcagttgcgggatagcacgcagaacagcctcacgcagagtaccgccctgtttcagctcccagttcaccagatgggcaatcacttcggtgtcggtttcagaaacgaaggtatagccacgcgcttttaactcttcgcgcagcggttcatggttttcgatgatgccgttatgcaccaccacaatgtgttcagaaacatgcggatgcgcattcacttctgaaggttcaccgtgggtcgcccagcgagtgtgagcaataccggtgccgccatgcagaggatgttcttccgctgcctgagccagcatctggactttaccgaggcgacgcaggcgggtcatatgaccttccgcatcaacaacggccagaccggcagagtcatatccgcggtattccagacgacgtaaaccttcaagaaggatttctgctacatcacgttgcgcgatcgcgccaacaattccacacatagtttttgattccgatttatatcgttgtcggtcaacctgtatgcccgttttttcgggcgccccgagccttgtagagagtggggttatttttatagttactgcttgtgggagggagattatgttatctcctcatcccatgtgaccggattacccggccagaatcactttttctttaccggacgacgccagccttctttctgagtctgcggcacacggctgatagctaatgcattttcgccgacattacgcgtcacagttgtacccgcagcaatggtcgcgcctttgcctactgttaccggggccaccagctgagtgtcggaaccgacaaacacatngtcgccgataatggtcttaaatttattcgcaccatcgtanttgcaggtaatggttcccgcgccgatgttaacgttatcgccaatttccgcatcgccaaggtaagtcagatgaccagctttcgagcctttacccagacgtgcttttttcatctcaacaaagttaccgacgtgtgcaccttccaacaactcagcaccaggacgcaaacgggcaaacgggccaatggtacaggccgccgccagattcgcgtcttccacgacggtatatgggctaatttcgcaatcatcgccaatcacgctgtttttaatcacgcaaccggtgccgattttcacgcgatggccgagagtcacgttgccctcgatgataacgttagtatcaatttcaacatcgcgcccgtgagtaagcgtaccgcgcagatcaaaacgcgccggatcgcgcagcataacgcctgctaacagcagtttttcagcctgttcggactggtaaacgcgctccagacgggagagttgcaggcggttattcacgccttctacttcgcttaaacgttgcggatgaacggcgacgatttcacgcccttcctgatacgccagcgcaataatgtcggtgatgtagtattcgccctgcgcattattgttggtcagcttcgccagccagcgtttcatatctgcgccgttagcgatcagaatgccggtgttgatctcctgaatctgacgctgctcgtcggtggcatctttgtgctcaacaatgccggtaactttgccgttttcacgggtgatacgtccataaccggtcggatcatccagtttcaccgtcagcagaccaatgccaccctgcggtttagcatcacgcagacgctggagtgtttcgacagagatcagcggcacgtcgccgtagagcattaaaatgtcttcatcatcggcaaagaaaggtgcggcctgctgcatggcatgacccgtacccagctgctctgcctgaagcacccagttcaggttgtcgtctttcagcgcctgttttagcagatcgccaccgtgaccgtacaccaggtgaacgtgcgctgcgcctaattcattcgcagcatcaatgacatgctgaaccatcgctttcccggcaagggtatgcagcactttcggaagatcggaatacatgcgcgtgcctttacctgcggcaaggatcactacgctcatagcattattcaacatacgcgtcctgactgtaatttgagaacgaatttaaaccgcttcaccttgaaaaaactacatttttttcatcgtgaaatggacagaggataaattgttcaataacggattatccccgctgacgaaagcgccattttcgaccatcgtcacgccttttgtctgcagaaaattaaggcagtaccttcatttaagcgtcaggtggatgtttttgctcttatttcgatcaatgaataaacgggaaaacagggggttttatatcagcaggatctatgtgaacgctattcaggacgggtcacacgcgcaaaaaaaagccagcctgtttccagactggcttttgtgcttttcaagccggtgttacatcgcttttttggtcaactcgataacgcgcagctgcgcgatcgctttggccagttccgcagacgcctgagcgtaatctacgtcgccgtgagagctgctaatgtgctcttcagccttacgtttcgcttccatggctcgcgcttcgtcgagatcctggccgcgaattgcggtgtcggccagaacggtcacgttgccaggctgcacttcaagaatgccgccagacagatagataaactcttcgtgaccgtgctgtttcacgatgcgaatcataccaggcttaatggcggtgagcagcggtgcgtggccagggtagatccccagttcaccttcgctacccgttacctggattttctcgaccagaccagagaacatttgttgctctgcgctgacgacgtccaggtggtaagtcattgccatatcaccctccgattaaggcgttaaagttttttggctttttccacagcttcttcgatggaaccgaccatgtagaacgcctgctccggcaggtgatcgtattcgccttccatgatgcctttaaagccacggatggtgtctttcagggagacgtatttacccggagaaccggtgaatacttctgccacgaagaacggctgggacaggaagcgctggatcttacgagcacgcgctaccaccagtttgtcttcttcagacagttcatccatacccaggatggcgatgatgtctttcagttcctgataacgttgcaggatggactgaacgccacgcgcggtgtcgtagtgttcctgaccaaccaccagcgggtccagctgacggctggtggagtccagcgggtcaacggccgggtagatacccagagacgcgatctgacggctcagtaccacggttgcgtcaaggtgcgcaaaggtggttgccggagacgggtcagtcaagtcatccgcaggtacgtatactgcctgtacggaggtgatagaaccggttttggtggaggtgatacgttcctgcagaacgcccatctcttccgccagggtcggctgataacctaccgctgaaggcatacggcccagcagtgcggatacttccgtaccggccagggtgtaacgatagatgttgtcaacgaacagcagaacgtcacgaccttcgtcacggaatttctcagccatggtcagaccggtcagagctacgcgcagacggtttcccggcggctcgttcatctggccatacaccagggatactttgtcgataacgttggagtcggtcatttcgtggtagaagtcgttcccctcacgagtacgttcacctacgcccgcaaacacagagtaaccggagtgctcgatcgcgatgttacgaatgagctccatcatgtttacggttttacctacacccgcaccaccgaacagaccaactttaccgcccttagcgaacggacacatcaggtcgataactttgataccggtttccagcagttcctgagagtttgacagctcttcgtaggaaggtgctgcgcggtgaatcgcccaacgctcttcttcaccgatctcgcctttcatgtcgaccggttcacccagtacgttcatgatacggcccagagtcgctttacctaccgggacttcgatcgggtgttcgaggtcttttacatccagaccgcgacgcagaccgtcggaggaacccattgcgatggtacgcacgataccgccgccgagctgctgctgaacttccagcaccagacgctcattaccattttgcacctcaagagcatcgtacacgcgcggtacggcatcctgagggaattcgacgtcaactacggcgccgattacctggacaatctttccagtagccatcttaaatcctctacgaaataacctgtttaaaccgcggcggcccccganacgatctcggtgagttcctgagtaatgctggcctgacgagctttgttgtataccaactgcagctctttaatcaggctgccgccattgtcggtcgcggctttcatcgccaccatacgggcggcctgctcgctggccaggttttcaaccacgccctgataaacctgagattcgacataacgacgcagcagggtatccagcaacgccttcggatcgggttcgtacaggtaatcccaggatttatgtttcagatcatcatcatctgatgccggtaacggcagcagctggctgatggtcggaacctgagacatggtgttaataaatttgttgctgacaatgtaaagcttgtccagacggccttcgtcgtaggcctgcaacatcacttttaccggaccgatcagttcggacagggaagggttatcccccatgccggtgacctgggcaacaacattgccgcccacggagttgaagaacgacacgcctttcgagccgatcattgcgaggtcgcattgaacgcctttgtcggtccaggtcttcatttccgccagcagttttttgaacaggttaatgttcaaaccaccgcacaaaccacggtcggtcgacaccaccaggtagcccacgcgtttaacgtcgcggttttccaggtaagggtgcttatattccagattaccgtgtgcaaggtgaccaatcactttgcgcatggtttctgcataaggacggctggccgccatgcgatcctgcgatttacgcattttggaagcggcgaccatctccatcgctttagtgatcttttgcgtgttctggacgcttgcgatcttactacgtatctcttttgcgccggccatgagcttctcctcaatgccttgcggcctgccctaaggcaagccgccagacgttaccaggattgggttgctttgaaggaatcgaggatgcctttcagcttgccttcgatttcgtcgttgtagccaccggtctggttgatctcttgcatcaacggagcgtgatcacggtcgacgtaagccagcagagcggcttcgaagctgccgattttcgacagttcaacatccgccaggtaaccacgttctgctgcgaacagaaccagagactgctgcgcaacggacatcggcgcatactgtttctgtttcagcagttcggtcactttttgaccgtggtcaagctgcttacgtgttgcatcgtcaaggtcggatgcaaactgagagaacgctgccagttcacgatactgtgccagagcggtacggataccaccggacagttttttcatgatcttggtctgtgctgcaccaccaacacgggatacggaaatacccgggttaaccgcaggacgaataccggcgttgaacaggttggtttccaggaagatctgaccatcggtaatggagattacgttggtcggaacgaacgcagaaacgtcacccgcttgagtttcgataatcggcagcgcggtcagtgaaccggttttccctttcacttcacctttggtgaaagcttcaacgtattcggcgttaacacgcgcagcacgctccagcagacgagagtggaggtagaatacgtcgcccgggaatgcttcacgtcctggcggacgacggagcagcagcgagatctgacggtaagcaacagcctgtttagacagatcatcgtaaatgatcagcgcatcttcaccgcggtcacggaagtattcgcccattgcgcaaccggcatacggtgccaggtattgcagtgcagcggattcagacgcggttgctaccacaacgatggtgttagccagtgcgccgtgctcttccagtttacgtaccacgttagaaatggtggacgctttctggccgatagcgacatagatacatttgataccggaatcgcgctggttgatgatggcatcgatagccagtgcggttttaccggtctgacggtcaccgatgatcaattcacgctgaccacgaccgattgggatcatggagtcaacggctttataaccggtctgtaccggctgatctacggactgacgttcgataacgcccggagcgattgcttctacagcagagaagccgtcgtgatccagcggacctttaccgtcgattggtgcacccagagtgttaaccacacggcccagcaggccacggccaaccggaacttccaggatacggccagtacacttaactttcatgccttcggcaaggtcagcatacggacccataacaaccgcaccaacagagtcgcgctcgaggttcagtgcgatagcgtaacggttacccggcagggagatcatttcaccctgcatacaatcggccaggccgtgaatgcggataacaccgtcacttacagaaacaatagtaccttcgttgtgagcttcactcacaacattgaactgagcaatgcgctgcttgatcagttcgctgatttcggtggaattcagttgcatgctccagtccccttaagactgcaagacgtctgcaaggcgctcaagacgaccgcgtacgctgccatcaatgaccatatcacccgctcggatgataacgcctgccattacagacttatcgattttgcaattcagcttaactttgcgtgacagacgtttttccatcgcagcagaaattttcgcgagctgttgttcactcagtgcggcagcggaaatgacgtctacctcagcggtagcctcactcacggcacgaaggtgaataaactgctccagaacatccgggagcgcgttaagacgaccattttcagccattacccgaataaggttctgaccgttttcgtccagttgctcaccacaaactgcgataaacgactcggcaagcgtttctggcgcaagcgcgccagagagaagctctgccatttgttcgtttttggttacctcggcggcaaacgccagcatgtcctgccagcgttctacactttggtgttcgacggcaaagtcaaaagctgctttggcgtaggggcgagctaccgtaataaattcagacatcagcccctccctccttacagttcagcgacaagtttatccacgatgtcgctgttagcagcttcatccacggaacgttcgatgatcttctcggcgccagcaacagccaggatagcaacttgcttacgcagctcttcacgggcacgtttacgctcggcttcaatttccgcctgcgcctgggccacgattttagtacgttcctgttctgcctcagctttcgcttcgtccagaatctgcgagcggcgtttgttcgcctgctcgatgattacctgggcttccgctttcgcttttttcagctggtcggtcgcgctggcctttgcaaggtcaaggtccttatgtgctcgttctgcggaagcaaggccgtcagcaatttctttttgacgtttttcgatggctgcca

SEQ ID NO: 1601 - DNA, 1982 bp, Escherichia coli
  Strain O55:H7
gccatacgtacttcatgcagaacagaacgaacaggacaaacgcgatggcctggccgaggattgttgcgttaagattcacagcacaatgcctctatttagttaacgttctgatattgctctttaaataaaagcaacgcttactacgcgacagcgaacatcacgtacagacccagacctacagcgatcatcgggatagcatccaccagacccataacgataaagaactgagtacgcagcagaggaatcagatcaggttgacgcgctgcgccttccaggaatttacccccgaggatgccgataccgatcgcagcaccgattgccgccagacccatcatcacagcggcagccatgtacagcagatccatattcaggttttccatgacagtctccagtttgtttcagttaaaacgtagtagtgttggtaaattaatgttcttcagacgccatcgacagatagacgatcgtcagaaccatgaagatgaaggcttgcagcgtaatgatcaggatgtggaaaatggcccacggcacattcaggatccactgtgaccaccacggcaacagaccagcaatcagaatgaaaatcagctcaccggcatacatgttaccgaacagtcgcaaaccgagtgaaactggtttggacagcaggcttaccccttcaaggattaagttgacaggaatgaacgcccagtgattgaacggctgcagcgtcaactctttcgtgaagccgccgatgcctttcattttgatgctgtagaacagaatcaggataaatacgcccagtgccatagacagcgttacgttcacgtccgcagacggaaccacacgcagtgcaggcagacccagtacatgttcagcaatgtacggcagcaggtcgataggcagtaaatccatcaggttcatcaggaatacccagacgaagatcgtcagggccagcggagcaatcagcttgcttttgccatggtacatgtctttcacgctaccattaacaaagccgatcaccagctcaatcgcggtctgaaacttacctggcacaccgctggtcgcctttttggctacgctacggaataaaaccaggaacaacagacccagcaccaccgagaagaacatggagtcaatattgattgtccagaaggtggctggggggttttgtggatccaccagcgagaatgtacgcaggtccagctgaaggttattcaggtggtgtcctatgtaatcctgcggcgtcatattttctgaagccatgatgccttttaccctttgttgttaattacagccggtgccagtatctgaaccaccagcaccaaaacccacgtaacgatcagcggcaagaataccgcctttaaaaccgccaacgccaccaccagtaacaccaacatcgccagaactttgaaagcttcaccaaatgcgaatgtccaggccacccggcctttcgctggtgtatgcgcctggtgacgccaggcaaatatcataaacaaaacgttaggcagaaagactgccaggcccccgcttattgcagagacgccccagaaggggtctttgaggctgaacagcaatccacttgctatcaccaccagtaactgaacgagcagaagcttccgagcaacgtttcgactcacgagcgacacagacatcacgtttttcactcctgctcccttcgaggtatgccgcgtgtcgtataaaactttctttaaggcttagagtcaagcatcaaaaagcggtcaaattatacggtgcgcccccgtgatttcaaacaataagtagccaaaaggtgaataaatgtttaaatatttttccagtgcatacaattgcgacttttctactaaccctgttcgatcatgaaaaactgtaaataacgcgtaaacactggtgataaagcgtgcttcagatcacatattgcgcatgttcgcgcacagcatatttatttacttggcaaatgatgcctttgcaagtttatgatatttcagtctaaaaacagatactgt

SEQ ID NO: 1602 - DNA, 246 bp, Escherichia coli
  Strain O55:H7
  modified_base (243)..(244): a, c, g or t
taaatgacatttacacaacaaaaaccacccattgacatttttaataatgttttaacagccaatgatggttcttagcgccgatttttagcagactgatattttcactaatgacttattttctgcttaccaaaaaaagccacgttatcttgttgatgcaaaagagtgaacgtggcgttaaatgtaaccagttatatcagtagaaaacctggttgttgttaacagtctaaccggtcaattttttannat

SEQ ID NO: 1603 - DNA, 17103 bp, Escherichia coli
  Strain O55:H7
  modified_base (3)..(4): a, c, g or t
  modified_base (8218)..(8221): a, c, g or t
  modified_base (11122)..(11122): a, c, g or t
  modified_base (11126)..(11127): a, c, g or t
  modified_base (12014)..(12014): a, c, g or t
  modified_base (12838)..(12838): a, c, g or t
tannaattaaattttatttgctttaatcaccaccagatgacgttcgccatccagggctggaacctgaagtttaaccactgattcgacctgatattcttcgggcaacaaagcgatttcatcttccggcatttgccctttcagcgcgtagaaacggccttgctcaccaggaagatggtggcaccagctcaccatatcgttcagagaggcaaaagcgcggctaattacgccatcaaatggcggctctgaaggaaactcttctaccctgctctgtactggctcaatattctccagtttaagctcatgttgcacctgacgaaggaaacgcacgcgtttaccaaggctatccaacagagtgaaatgggcttcaggacgcacgatagagagtggaatgccaggcagtccaggaccggtgccgacatcgataaaccgttcaccttgcagatacggtgccaccacaatgctatcgagaatatggcgtaccagcatctcattaggatcgcggaccgaagtcaggttgtacgctttgttccatttatgcagcatattcacgtaggcaataagctggtttttctggtgatcggtaagcgaaatacctgcgtctttcagcagtaaggagagtttgttgagcacggtgattacctgttcttgatgcgttgcctggtaagcgggtgcttaccaggcatttttaatgcgttatgcgctacgacgcagcataccctgttttttcagccacaccagcagaatggagatggccgcaggcgtgacgccagaaatacgtgaagcctggccgatagaggccggtttgtgatcgttaagtttggcgatcacttcgttagaaagaccggatacctggcggtaatccagtgtcgcgggtagcaaggtgttctcgttacgcagctgcttttcgatctcatcttgctggcgcgcgatataaccttcgtatttaacctgaatctcaacctgttccgccgcctgttcgtctgtcaacgcaggggcaaacggcgtcagcgtggttaatttttcataagtcatttccggacgacgcagcagatcttcaccactggcttcacgggaaagcggcgcagtcaggtgagcattcacttcggctgcagcttccgccgacggggttacccaggtcgatttcagacgctgacgctcacgctcgatattctcaagtttctcgttaaagcgcgcccaacgttcgtcatccaccaggcccagttcacgaccgatttcagtcaaacgcagatccgcattatcttcgcgcagcatcagacgatattctgcgcgcgaggtaaacatacgatacggttctttggttcctaaagtgcacaggtcatcaaccagtacgccgagataggcctgagaacgcgccggagcccaaccttctttgtcatcagacagacgggcagcgttaagaccggccagcaaaccttgcgcagcggcttcttcgtaaccggtagtgccgttaatctgaccagcaaagaacagcccctggataaacttgctctccagcgtcggtttcaggtcgcgaggatcgaagaagtcatactcaatggcataacccggacgcacgatcttcgcgttttccatcccctgcatagagcggacgatttgcatctgcacatcgaacggcaggctggtggagataccgttcggataaatttcgttagaagtcagcccttccggttcaaggaagatctgatgctgatttctgtcggcgaagcgcatgactttgtcttcgatcgacgggcagtagcgtgggccgacaccttcgatcacccctgcgtacattgggctacgatcgaggttactgcggatcacatcatgggttttctcgttggtatgggtgatataacacggcacctgctgtggatgctgggacgcattgcccataaaagagaataccggcattgggttatcgccatgctgttgcgcaagcacgctaaagtcgatggttcgagcatcaatacgcggtggtgtcccggttttcagacgaccaacgcgcagcggaagttcacgcaaacggcgagaaagcggaatggacggcggatcaccagcacggccaccgctgtagttatccagaccgatatgaattttaccgtcgaggaacgtcccaacggtgagcacgacggctttggcacggaacttcagtcccatttgggtaacagcaccgaccacacgatcgttttcgacaataagatcttcaaccgcctgctggaagatcatcaggttcggttggttctccagcgccgtacgtaccgcctgacggtagagcacacgatccgcctgagctcgggtagcgcgaactgccggtcccttgcttgcgtttagtatcctaaactggatacccgcctgatcgatcgctttcgccatcagaccgccgagtgcatccacttcttttaccagatgtcccttcccaataccgccgatcgccgggttgcagctcatctgccccagagtgtcgatattgtgtgtcaaaagcagagtctgttgacccatacgcgccgcagccatcgcggcctcggtgcctgcatgacccccgccaatgatgatgacgtcaaaaggatccggataaaacatggtgattgcctcgcataacgcggtatgaaaatggattgaagcccgggccgtggattctactcaactttgtcggcttgagaaagacctgggatcctgggtattaaaaagaagatctatttatttagagatctgttctattgtgatctcttattaggatcgcactgccctgtggataacaaggatccggcttttaagatcaacaacctggaaaggatcattaactgtgaatgatcggtgatcctggaccgtataagctgggatcagaatgaggggttatacacaactcaaaaactgaacaacggttgttctttggataactaccggttgatccaagcttcctgacagagttatccacagtagatcgcacgatctgtatacttatttgagtaaattaatccacgatcccagccattcttctgccggatcttccggaatgtcgtgatcaagaatgttgatcttcagtgtttcgcccgtctgttttgcaccggaatttttgagttcagcctcgagtttatcgatagccccacaaaatgtgtcatattcacgactaccaataccgattgcgccaaagcggaccgcagaaagatcgggcttctgttcctgcaatgcttcatagaaaggagaaaggttgtccggaatatctccggcaccgtgggtggagctgataaccagccagatccccgaggcagataaatcttccaacagcggaccgtgcagcgtttcggtggtaaaacccgcctcttccagcttttcagccaggtgttctgctacatattcggcaccgccgagggtgctgccgctgataagagttatatctgccataaaccgccacctttattaagagtggcgtattgtacgctgtgaacgcgttgggatctacctgtggaaaagtatgggattaaaaaagccgatcagggcttgatggtacgcatgatcgggttctgcaggacgatcagtgtctcggtggactgaatttcatcaattgtttggatcttgttgataagtacatgctggagagcatcgatcgaacggcacatcacttttataaagatgctgtagtggccggtggtgtagtacgcctcggtcacttcatcgaggctttccagctttgccagcgcggaagggtagtctttggcgctctttaatataatgccgataaagcagcctacgtcataaccgagctgcttcgggctgacatcaatacgcgccccggtaatgatccccgcctgcttcattttctctactcgaacgtgaatcgtccccggactgacgccaaattgtttcgccagttcggcgtaagcggtgcgcgcattgcccattaatgcttccaggatgccacggtccagattgtcgatcagataattttccataggattttcttatgcggattgatgattcattctattttagccttcttttttaatgaatcaaaagtgagttaggctttttattgaatgattattgcatgtgtgtcggtttttgttgcttaatcataagcaacaggacgcaggagtataaaaaatgaaaaccgcttacattgccaaacaacgccaaattagcttcgtgaaatctcacttttctcgtcaactggaagaacgtctggggctgatcgaagtccaggcgccgattcttagccgtgtgggggatggcacgcaggataacttgtcgggctgtgaaaaagcggtacaggtaaaagtgaaagctctgcctgatgcccagttcgaagtggttcattcactggcgaagtggaaacgtcagaccttagggcaacacgacttcagcgcgggcgaagggctgtacacgcacatgaaagcccttcgccccgatgaagaccgtctttctccgttgcactcggtctatgttgaccagtgggactgggaacgcgtaatgggcgacggtgagcgtcaattctcgactctgaaaagcacggtagaggcgatttgggcgggaattaaagcaaccgaagctgcggttagcgaagagtttggcctggcaccgttcctgccggatcagatccacttcgtacacagccaggagttactgtctcgttatccggatcttgatgccaaagggcgtgagcgggcgatagcgaaagatcttggtgcggtattccttgtcgggattggcggcaagctgagcgatggtcatcgccacgacgtgcgcgcaccggattatgatgactggagcaccccgtcagagctgggccatgcgggtctgaacggcgatattctggtgtggaaccctgtactggaagatgcgtttgagctttcttccatggggatccgcgtggatgccgacacgttgaagcatcagttggcgctgaccggtgatgaagatcgtctgcagctggaatggcatcaggcgttgctgcgcggtgaaatgccgcagaccatcggcggcggtatcggccagtctcgtttgaccatgctgctgctgcaactgccgcatatcggccaggtccagtgtggagtatggccagctgctgttcgcgagagcgtcccttctctgctgtaataatttatcgccgccagcgtctgagcaggcggcttcgcatcccggtatcaaagcgccagatatgatcgaaaatgcgcatgatgccgggtttgccgtgtgccgacatcgccacggcatgaaagcgatgctgatgtacccgctgcagctctttcactttactcgtcacgtcgtcaggcaaccgctgggcgataaaatcagaaatcaccaccgcatcggcatcaaaccattccctgctttgcaagcgttccataatggcgcgaaaacaactggcaagatcggtgccgccacgaaactgctggcttaaaaaacggattgcttgttcgatgccttgtgggcctgaaagctcataacggacgatctcggtggaaaatagcataatataacagcgccggttttcagcgagagcaatgcgcatcaaagccaggcagaacgctttcgcacactgttcattaaagccgcccattgagccggaagtatccacgcagacaataaacggtccgcgcggctgttcgtcgtaatctttatgcaccaccgggcgttcgatcactttttcacgccacgactcaccgtgcaggcgataggtgagcaactgtttttccaccagccgacggtaaaactcatactccagttccgttatccctagtgtcgccagttctggcggcagaagacgtaaaatatcatcgctttgttgcagaccatcaacctgctcaggaaccgtcgccggttcgcgcaccatggtgcggaaggtttccatctgcgcatcgttgcgcggtattgatttggcttcccgggaacgccccagttgttctgccaggcgtttcagttccggctgttcgttaagaaattcaccgtatttcacaatcaactgatagtcgccacgtttaagctgaccggcgctcatatcccacagacgaccagctgcggtattgttatctgcgagaatcggttcaagttgtccgctcagcgtcatgcgttcctgaacttcactcaacagttgttcgcgttcttcttctaatagctgttgatttaacgtcgttgcttgcacgatcagacttaaacgccagcgctggagaaaaagcgtgtgtaacgctgaagtgatcgtgctgttagcatcgaccaactgtcgggcttgttctgcccatggggaattcagacgatgcagtaagtccaggatctgtggtagctgcacaataaactgcggcgtggagaggagctggctttgctgatagcacatcacctcttcggtgagttccggcgggactcgggcatctttcagccgactgcgcagcgcctcacgccagcggggaacatcatcagtgattgccgccttcagtcgtgggaatttttcaaagaagactgccagctgcggtgaggccagcagcgcgatgatcatctcttcgatcaatccctcttcgctgacggccagcatcacattaagcgtatccagcgttagcattgttgtgcctggcgaatctgtgcgccgacatcctgtaggctggcttcaatgcgacctaaccagtcgccagggataaacagacatctttgctgttcgctgaataaagcgtgttgcttgcgccagtcgctttcaagctcttccaattgttgttttatttcacctggcagaccttcagccgatgaaccgggaagtgccagcgtactgccttgtaaacttacatcgcgtacaacaagatgttgggcgctatcaacttccagattcagtttctgggcaaagccgataccgttcagtttgccgcgaatttcaccacctttgctcagccactgttccagcgcgctacgctcaaaggagatatgaaccacttccatattatgcaattttaacggtttttgcagcagcagagtcagagtggaagcagtaacgttaacaggaagttgatactgctgacgacggctgaaaatgccgcccagacgaattaccgttaaggctgttttatcgctttgttgctgctggagttgcaggtgacgttgcacaatcgcgcccaggcgggtcaacatcccttgctgttgccaggcatgaccggtcatcaatacatcaatttgttgttgtatcaaattcaggctttgcgcgtcataccacaggcaatctttcagcaaaatgagatctaccggggcaacagcactgcgaccgctaaaaaaggcgctggcctgcaataatcgaatcgcttttttccagcgacgatccgagacataaggcgcatccggtaatttatccagttgctggcgcagcataaaaatcagctcaaatacatgatcgggcagcgtaatttcaccaatctctttctgccagcgttcatattcttcatctgtgacctgcaaggaggctggaaccggattgtcattttcatcctgttgactggtcagcatggagcggaaattcgctttatcctgcactttatctaaccacagacgaatcagcatgcggtcatataacgcttccagactgctgtctgcttccggcagctcgttggaggccgccaccagcaggcgcatcgggattttttctacgtgtgcaccgttgcggaactggcgctcgttaatggcggtgagcagggtattaagaattgccggacccgctttccagatctcatccagaaagacgatttctgcttccggcaggtaaccgctggttaaacgttcatagcgcccttcatcttttagcgcctgaatagaaaggggaccaaaaacttcttccggcgtggagaagcgggtcatcagatattcaaacgcgcgggcattctgaaaggcgaattttaagcgccgggcgatcaaacttttggcaatacctggcgggccaaggaggaacacactttcaccacttaatgccgctaataaacacaagcggatggcgtggctacgttcataaagcaccttttccaacgaactgctcaggcgggaaattctttccgctaataaatgagggtgagccataatgaagtggcgtcctttcgtcaaaagttctgcgtaaattgcgagtatagacgtttcttgctggtggctaaaatagtctcaaaggggggggatttttctttgagccaggttaatgtggccgcatttaggagtacgattttgccgttaatcgtgcatactgtgcgcttttttgtgnnnnaagggactaagcacacatttcatatttcaacgaaagactagtctatgagcactgataataagcaatcattgcccgcgattaccctcgcggcgattggagttgtctacggcgatattggtaccagcccgttatatacacttcgtgaatgtttgtccggccagtttggttttggcgttgaacgcgatgccgtgtttggctttttatcgctgatcttctggctgctaatctttgtggtttccattaaatatctcaccttcgtgatgcgggcagataacgccggtgaaggggggatcctgacgttgatgtcgcttgccgggcgtaatacgtcggcgcgaaccacatcaatgctggtgattatggggctaatcggcggcagctttttctatggtgaagtcgtcataacacccgctatttcggtgatgtcagccattgaaggtctggaaatcgtcgccccgcagctggatacctggatagttcccctctcaattatcgttctcactttattatttatgattcaaaagcatggcacggctatggtcggtaagctgtttgcgccgatcatgctgacctggtttttgattctggcaggactggggttacgtagcattattgctaaccaggaagtgctgtatgcgctgaatccgatgtgggcggtgcatttcttccttgaatacaaaacggtttcttttattgcattaggggcagtggtgctgtcgattacgggggtcgaggcgctgtatgctgatatggggcactttggtaagttccctattcgcctggcgtggttcaccgtcgtattaccttccttgacccttaattacttcggtcagggagcgctgttgttaaagaatccggaagcgattaagaacccgttcttccttttggcaccggactgggcgctgatcccgctgctgatcatcgccgcactggcgacggtaatcgcctcgcaggcggttatctctggcgtcttttcattgacgcgtcaggcggtacgtctgggatatttgtcgccgatgcgcattattcacacctccgaaatggagtcagggcaaatctatattccgtttgtgaactggatgctctatgtcgcggtcgtgattgtgattgtcagctttgagcactccagcaacctggcggcggcgtacgggattgcggtgaccggaaccatggtgctgacgtctattctctcgactaccgtggcacgtcagaactggcactggaataagtattttgttgcgctgatcttgattgctttcctttgtgtcgatattccattgttcaccgctaacctcgataaactgctctccggcggctggttgccattgagcctcggtacggtgatgtttatcgtgatgaccacctggaagagtgagcgtttccgcttgctgcggcggatgcatgaacatggtaactctctggaagcgatgattgcttcgctggagaaatcaccgcctgttcgcgtgcccgggaccgcggtatatatgtcgcgtgcaatcaacgtcattccctttgcgctgatgcataaccttaaacataacaaggtattgcatgagcgggtgattctgttaactctgcgcaccgaagacgctccatatgtccataacgtccgtcgggtacagattgaacaactgtcgcccactttctggcgcgtggtggcaagttatggttggcgagaaacgccaaacgtggaagaagttttccaccgctgcggtctggaaggattaagttgccggatgatggaaacctccttctttatgtcgcatgagtcgttgatcctcggcaaacgcccgtggtatttgcgtctgcgcggcaagctgtacttgctgctgcaacgtaatgcgctgcgtgcaccagatcaatttgaaatcccgccaaacagggttatcgaactgggtactcaggtcgaaatctaacgccagacgcctcctttcttcataagggggcgtttttgttttcatggttaatcaccatgtaaaacgtttcgaggttgatcacatttccgtaacgtcacgatggttttcccaactcagtcaggattaaactgcgggtcagcgaaacgtttcgctgatggagaaaaaaatgaaaaaaggcaccgttcttaattctgatatttcatcggtgatctcccgtctgggacataccgatacgctggtggtgtgtgatgctggtttacccatccccaaaagtacaacgcgtatcgatatggcattaacccagggtgtaccttcttttatgcaggtgctgggcgtcgtcacaaatgaaatgcaggtcgaggctgccattatcgcggaagagatcaaacaccataatccgcaactccacgaaacgttgctcactcaccttgagcagctgcaaaaacaccagggaaataccattgaaattcgttacaccacgcatgaacaattcaaacaacaaaccgcagaaagtcaggcggtaattcgcagcggagaatgttctccgtatgcgaatatcattctctgtgctggcgtgacgttctgaggccgtcatggaagcattacttcagcttaaaggcatcgataaagccttcccgggcgtaaaagccctctcgggcgcagcgttaaatgtctatccgggccgcgtgatggcgctggtgggcgaaaacggcgcgggtaaatccaccatgatgaaagtgcttactggcatctatactcgcgatgccggtacgcttttatggctggggaaagaaacgacatttaccgggccgaaatcttcccaggaagccgggattgggattatccatcaggaactgaacctgatcccgcagttaaccattgccgaaaacattttcctcggtcgtgagtttgttaatcgctttggcaaaattgactggaaaaccatgtatgccgaagcggataaattgctggctaaacttaacctgcncttnnaaagcgacaagctggtgggcgatctttccatcggtgaccagcaaatggttgaaatagccaaagtgctgagctttgagtcgaaagtcatcattatggatgaaccgaccgatgcgctgaccgataccgaaaccgaatccctgttccgcgtcatccgcgagctgaaatcgcaaggccgcggtattgtctatatctcccaccgcatgaaagaaatcttcgagatttgcgatgacgttaccgtttttcgtgacggacaatttattgctgagcgcgaagtggcatcactgaccgaagattcgctgattgagatgatggtgggtcgcaagctggaagatcaatatccgcacctggacaaagcgccgggagatatccgcctgaaagtcgataatctctgcggacctggcgttaacgatgtctcttttactttacgcaaaggcgaaattcttggcgtctctggtttgatgggcgcaggtcgtaccgaactgatgaaagtgctctacggcgcactaccgcgcaccagcggttacgtcaccctggatgggcatgaagtcgttacccgttcaccgcaggatggcctggcaaacggcattgtgtatatctccgaagaccgtaaacgtgacggtttagtgttgggcatgtcagtaaaagagaacatgtcgctgacagcgctgcgctacttcagccgcgctggcggcagtttgaagcatgccgatgaacagcaggctgtgagtgattttattcgcctgttcaatgtgaaaacgccgtcgatggagcaggcaattggtctgctttccggtggcaatcagcaaaaagtggcgattgcccgcggtctgatgacacgccccaaagtgttgatccttgatgaacctacccgtggcgtagatgtcggngcgaaaaaagagatctatcaactgattaaccagttcaaagccgatggcttgagcatcattctggtgtcatcggagatgccagaagtattaggcatgagcgatcgcatcatcgtcatgcatgaagggcatctcagcggggaatttactcgtgagcaggccacccaggaagtgttaatggctgccgctgtgggcaagcttaatcgcgtgaatcaggagtaaaaaaatgacaacccagactgtctctggtcgccgttatttcacgaaagcgtggctgatggagcagaaatcgcttatcgctctgctggtgctgatcgcgattgtctcgacgttaagcccgaactttttcaccatcaataacttattcaatattctccagcaaacctcagtgaacgccattatggcggtcgggatgacgctggtgatcctgacgtcgggcatcgacttgtcggtaggttctctgttggcgctaaccggcgcagttgctgcatctatcgtcggcattgaagtcaatgcgctggtggctgtcgctgccgctctcgcgttaggtgccgcaattggtgcggtaaccggagtgattgtagcgaaaggtcgcgtccaggcgtttatcgctacgctggttatgatgcttttactgcgcggcgtgaccatggtttataccaacggtagcccagtgaataccggctttactgagaacgccgatctgtttggctggtttggtattggtcgtccgctgggcgtaccgacgccagtctggatcatggggattgtcttcctcgcggcctggtacatgctgcatcacacgcgtctggggcgttacatctacncgctgggcggcaacgaagcggcaacgcgtctttctggtatcaacgtcaataaaatcaaaatcatcgtctattctctttgtggtctgctggcatcactggccgggatcattgaagtggcgcgtctctcctccgcacaacccacggcggggactggctatgagctggatgctattgctgcggtggttctgggcggtacgagtctggcgggcggaaaaggtcgcattgttgggacgttgatcggcgcattaattcttggcttccttaataatggattgaatttgttaggtgtttcctcctattaccagatgatcgtcaaagcggtggtgattttgctggcggtgctggtagacaacaaaaagcagtaataacgactacaggacatcttgaatatgaacatgaaaaaactggctaccctggtttccgctgttgcgctaagcgccaccgtcagtgcgaatgcgatggcaaaagacaccatcgcgctggtggtctccacgcttaacaacccgttctttgtatcgctgaaagatggcgcgcagaaagaggcggataaacttggctataacctggtggtgctggactcccagaacaacccggcgaaagagctggcgaacgtgcaggacttaaccgttcgcggcaccaaaattctgctgattaacccgaccgactccgacgcagtaggtaatgctgtgaagatggctaaccaggcgaacatcccggttatcactcttgaccgccaggcaacgaaaggtgaagtggtgagccacattgcttctgataacgtactgggtggcaaaatcgccggtgattacatcgcgaagaaagcgggtgaaggtgccaaagttatcgagctgcaaggcattgctggtacatccgcagcccgtgaacgtggcgaaggcttccagcaggccgttgctgctcacaagtttaatgttcttgccagccagccagcagattttgatcgcaccaaaggtttgaacgtaatgcagaacctgttgaccgctcatccggatgttcaggctgtattcgcgcagaatgatgaaatggcgctgggcgcgctgcgcgcactgcaaactgccggtaaatcggatgtgatggtcgtcggatttgacggtacaccggatggcgaaaaagcggtgaatgatggcaaactagcagcgactatcgctcagctacccgatcagattggcgcgaaaggcgttgaaaccgcagataaagtgctgaaaggcgagaaagttcaggctaagtatccggttgatctgaaactggttgttaagcagtagttttaatcaggttgtatgacctgatggtgacataaatacgtcatcgacagatgaacgtgtaatataaagaaaagcagggcacgcgccaccctaacacggtggcgcattttatggacatcccgaatatgcaaaacgcaggcagcctcgttgttcttggcagcattaatgctgaccacattcttaatcttcaatcttttcctactccaggcgaaaccgtaaccggtaaccactatcaggttgcatttggcggcaaaggcgcgaatcaggctgtggctgctgggcgtagcggtgcgaatatcgcgtttattgcctgtactggcgatgacagcattggcgagagcgttcgccagcagctcgccactgataacatcgatattactccggtcagcgtgatcaaaggcgaatcaacaggtgtggcgctgatttttgttaatggcgaaggtgagaatgtcatcggtattcatgccggcgctaatgctgccctttccccggcgctggtggaagcgcaacgtgagcgtattgccaacgcgtcagcattattaatgcagctggaatcaccactcgaaagtgtgatggcagcggcgaaaatcgcccatcaaaataagactgtcgttgcgcttaacccggctccggctcgcgaacttcctgacgaactgctggcgctggtggacattattacgccaaacgaaacggaagcagaaaagctcaccggtattcgtgttgaaaatgatgaagatgcagcgaaggcggcgcaggtactgcatgaaaaaggtatccgtactgtactgattactttaggaagtcgtggtgtatgggctagcgtgaatggtgaaggtcagcgcgttcctggattccgggtgcaggctgtcgataccattgctgccggagatacctttaacggcgcgttaatcacggcgttgctggaagaaaaaccattgccagaggcgattcggtttgcccatgctgccgctgcgattgccgtaacacgtaaaggcgcacaaccttccgtaccgtggcgtgaagagatcgacgcatttttagacaggcagaggtgacgcttggctacaatgaaagatgttgcccgcctggcgggcgtttctacctcaacagtttctcacgttatcaataaagatcgcttcgtcagtgaagcgattaccgccaaagttgaagcggcgattaaagaactcaattacgcgccatcagctctggcgcgtagcctcaaactcaatcaaacacataccattggcatgttgatcactgccagtaccaatcctttctattcagaactggtgcgtggcgttgaacgcagctgcttcgaacgcggttatagtctcgtcctttgcaataccgaaggcgatgaacagcggatgaatcgcaatctggaaacgctgatgcaaaaacgcgttgatggcttgctgttactgtgcaccgaaacgcatcaaccttcgcgtgaaatcatgcaacgttatccgacagtgcctactgtgatgatggactgggctccgttcgatggcgacagcgatcttattcaggataactcgttgctgggcggagacttagcaacgcaatatctgatcgataaaggtcatacccgtatcgcctgtattaccggcccgctggataaaactccggcgcgcctgcggttggaaggttatcgggcggcgatgaaacgtgcgggtctcaacattcctgatggctatgaagtcactggtgattttgaatttaacggcgggtttgacgctatgcgccaactgctatcacatccgctgcgtcctcaggccgtctttaccggaaatgaagctatggctgttggcgtttaccaggcgttatatcaggcagagttacaggttccgcaggatatcgcggtgattggctatgacgatatcgaactggcaagctttatgacgccaccattaaccacgatccatcaaccaaaagatgaactgggggagctggcgattgatgtactcatccatcggataacccagccgacccttcagcaacaacgattacaacttactccgattctgatggaacgtggttcggcttagatttacgctgtcttttgatcaaattattaccatcggttgttttcagaagcatgaacattgctgctgaagcaacagtaataatgcccattgtgataaacgtatagtggaattgttcgacagtcgttgtgccttccattccttcataaacgcgaaggacggccgcacttacagctacgcctaaactgatagacagttgctgcgtgaccgccagaacactgttaccgctgctggcgttgtcatcggtcagatcggcaagtgtgatggtattcatcgcggtaaactgcgtcgacatagccatccctaatataaacaacggcaagatcagcatccatattgccattgccggtgattgcaaagagaactgagcgatcattagcccaataatcaccgtgatccccactaatgtatggcgatagcccagacgacgtaagacttgggtaaccatcgattttgcaataatggaacctaacgctgtcggtgccatcatacagccagcaataaacgcctgataaccaaatcctacctgtaacattaatggcataaggaacggtacacagccggtccccagacgggttgcaatattgcctacgataccgatcgagaaagtgcgggttttaaataaatctaatgaaattaatgggtttggcgtgcgtcgtgcatggagaatatagagaagcagtaacccgatgctggtgacaattaccgtcaaggcaatccagctggcgacaatcttttccccgaatagctctattccgcttgagaagagaacaaggctgaggccaaacagcaaaaagccagtgatatcgaatctgcgtcgtgcggtggtgaaattgggcatatgtttgcgcgcgtaaagaaggcccgcaatacctatggggatattgattaaaaatatccagtgccaggttgcccaggtgaccagcacgccgccaag

SEQ ID NO: 1604 - DNA, 2060 bp, Escherichia coli
  Strain O55:H7
aaaattggccccaccagacccggcatggcgacaaaattcaatactggaagaagttcattacgaggataagcgcgcagtaaggccagccgagcaacaggcatcatcattgcgccgcctatcccctgaataacccggaagacaaccagctgtggtagcgaattagaaagtgcgcaggccagagaacccaatgtgaacagactcacggcaagggtaaaaatgcgacgcgtaccgaagcgatcggctagccatccgcttaccggaataagcatcgccaccgtcagcgtataactgatgatggctgattgcatcgcgagaggagaacgattaaggctatgagcgattgcgggtaaggcggtattcagaatagtggcatcaagtgcctgcatgaagaaggccatcgccgcgatccacggcaaacccgccatactgcgcttctttttatcgctcattcaatgtcctgttatcgggttatcacttatcaggtgagcgtagcagcgcctgacaagctttaaatgccgcatcgccatcgctttggataatcgcatcgactatcgcctgatgcagatccagctttatcactgtgtcgctggtaattgacgtgaagtaagtgtgataaaccgaatggaatagcgaggcgaatgaggtcaaaaacggattggcgctcatttcatagatatgctcatgccaggccatatcgacttcgatccagcgttcacggcgaaagttctcttttaatgccgccatttcggccattaacgtattgagatgcgctttctgttccgcggtgccaaccgttgctgccagtaggcaagcttgtggctccagacagatacgcataaccagaaagtgatcgatgacctgatgaaagttctcttctgtcatccaccaggtaagcaattcctgatcaagaaaattccagttcgattgtggcatgacccgggtaccaattcgcggtcgcggtaaaaccatcccttttgccgttaacgttttgaccgcttcgcgtaccgctgtacgactcactccaaattgctcgcccagctcaatctcaccgggcaaaatggtgccgggttcatattcaccttttaagatccgttgcgccagcttctcagccagaacatacgaaaggtttttctgtgcagctaactgttgtgcgcttaaaggcattactaatcttcctttttctttttattcctccttagtatgccactaggaagtgtgattacggttgcaaaaacggcaaattgcttgttttatggcacattaacggggcttttgctgaaaaaatgcgcggtcagaaaattattttaaatttcctcttgtcagaccggaataactccctataatgcgccaccactgacacggaacaacggcaagcacgccgccgggtcagcggggttctcctgagaattccggcagagaaagcaaaaataaatgcttgactctgtagcgggaaagtgtattatgcacaccccgcgccgctgagaaaaagcgaagcggcactgctctttaacaatttatcagacaatctgtgtgggcactcgaagatacggattcttaacgtcgcaagacgaaaaatgaataccaagtctcaagagtgaacacgtaattcattacgaagtttaattctttgagcatcaaacttttaaattgaagagtttgatcatggctcagattgaacgctggcggcaggcctaacacatgcaagtcgaacggtaacaggaagaagcttgcttctttgctgacgagtggcggacgggtgagtaatgtctgggaaactgcctgatggagggggataactactggaaacggtagctaataccgcataacgtcgcaagaccaaagaggggggaccttcgggcctcttgccatcggatgtgcccagatgggattagctagtaggtggggtaacggctcacctaggcgacgatccctagctggtctgagaggatgaccagccacactggaactgagacacggtccagactcctacgggaggcagcagtggggaatattgcacaatgggcgcaagcctgatgcagccatgccgcgtgtatgaagaa

SEQ ID NO: 1605 - DNA, 1622 bp, Escherichia coli
  Strain O55:H7
  modified_base (2)..(3): a, c, g or t
  modified_base (7)..(8): a, c, g or t
  modified_base (29)..(31): a, c, g or t
  modified_base (427)..(427): a, c, g or t
  modified_base (829)..(832): a, c, g or t
  modified_base (1181)..(1181): a, c, g or t
  modified_base (1383)..(1383): a, c, g or t
  modified_base (1417)..(1417): a, c, g or t
  modified_base (1550)..(1550): a, c, g or t
gnnaggnngagtaaagttaatacctttgnnnctcattgacgttacccgcagaagaagcaccggctaactccgtgccagcagccgcggtaatacggagggtgcaagcgttaatcggaattactgggcgtaaagcgcacgcaggcggtttgttaagtcagatgtgaaatccccgggctcaacctgggaactgcatctgatactggcaagcttgagtctcgtagaggggggtagaattccaggtgtagcggtgaaatgcgtagagatctggaggaataccggtggcgaaggcggccccctggacgaagactgacgctcaggtgcgaaagcgtggggagcaaacaggattagataccctggtagtccacgccgtaaacgatgtcgacttggaggttgtgcccttgaggcgtggcttccggagctaacgcgntaagtcgaccgcctggggagtacggccgcaagttaaaactcaaatgaattgacgggggcccgcacaagcggtggagcatgtggtttaattcgatgcaacgcgaagaaccttacctggtcttgacatccacagaactttccagagatggattggtgccttcgggaactgtgagacaggtgctgcatggctgtcgtcagctcgtgttgtgaaatgttgggttaagtcccgcaacgagcgcaacccttatcctttgttgccagcggtccggccgggaactcaaaggagactgccagtgataaactggaggaaggtggggatgacgtcaagtcatcatggcccttacgaccagggctacacacgtgctacaatggcgcatacaaagagaagcgacctcgcgagagnnnncggacctcataaagtgcgtcgtagtccggattggagtctgcaactcgactccatgaagtcggaatcgctagtaatcgtggatcagaatgccacggtgaatacgttcccgggccttgtacacaccgcccgtcacaccatgggagtgggttgcaaaagaagtaggtagcttaaccttcgggagggcgcttaccactttgtgattcatgactggggtgaagtcgtaacaaggtaaccgtaggggaacctgcggttggatcacctccttaccttaaagaagcgttctttgcagtgctcacacagattgtctgatagaaagtgaaaagcaaggcgtcttgcgaagcagactganacgtccccttcgtctagaggcccaggacaccgccctttcacggcggtaacaggggttcgaatcccctaggggacgccacttgctggtttgtgagtgaaagtcgccgaccttaatatctcaaaactcatcttcgggtgatgtttgagatatttgctctttaaaaatctggatcaagctgaaaattgaaacactgaacaacganagttgttcgtgagtctctcaaattttcgcaacangatgatgaatcgaaagaaacatcttcgggttgtgaggttaagcgactaagcgtacacggtggatgccctggcagtcagaggcgatgaaggacgtgctaatctgcgataagcgtcggtaaggtgatatgaaccnttataaccggcgatttccgaatggggaaacccagtgtgtttcgacacactatcattaactgaatccataggt

SEQ ID NO: 1606 - DNA, 2610 bp, Escherichia coli
  Strain O55:H7
  modified_base (3)..(4): a, c, g or t
  modified_base (65)..(68): a, c, g or t
  modified_base (152)..(153): a, c, g or t
  modified_base (446)..(447): a, c, g or t
  modified_base (484)..(486): a, c, g or t
cgnnccgggggaactgaaacatctaagtaccccgaggaaaagaaatcaaccgagattcccccagnnnnggcgagcgaacggggaggagcccagagcctgaatcagtgtgtgtgttagtggaagcgtctggaaaggcgcgcgatacagggtgnnagccccgtacacaaaaatgcacatgctgtgagctcgatgagtagggcgggacacgtggtatcctgtctgaatatggggggaccatcctccaaggctaaatactcctgactgaccgatagtgaaccagtaccgtgagggaaaggcgaaaagaaccccggcgaggggagtgaaaaagaacctgaaaccgtgtacgtacaagcagtgggagcacagagcaatctgtgtgactgcgtaccttttgtataatgggtcagcgacttatattctgtagcaaggttaaccgaatagggganncgaagggaaaccgagtcttaactgggcgttaagttgnnnggtatagacccgaaacccggtgatctagccatgggcaggttgaaggttgggtaacactaactggaggaccgaaccgactaatgttgaaaaattagcggatgacttgtggctgggggtgaaaggccaatcaaaccgggagatagctggttctccccgaaagctatttaggtagcgcctcgtgaattcatctccgggggtagagcactgtttcggcaagggggtcatcccgacttaccaacccgatgcaaactgcgaataccggagaatgttatcacgggagacacacggcgggtgctaacgtccgtcgtgaagagggaaacaacccagaccgccagctaaggtcccaaagtcatggttaagtgggaaacgatgtgggaaggcccagacagccaggatgttggcttagaagcagccatcatttaaagaaagcgtaatagctcactggtcgagtcggcctgcgcggaagatgtaacggggctaaaccatgcaccgaagctgcggcagcgacactgtgtgttgttgggtaggggagcgttctgtaagcctgtgaaggtgtgctgtgaggcatgctggaggtatcagaagtgcgaatgctgacataagtaacgataaagcgggtgaaaagcccgctcgccggaagaccaagggttcctgtccaacgttaatcggggcagggtgagtcgacccctaaggcgaggccgaaaggcgtagtcgatgggaaacaggttaatattcctgtacttggtgttactgcgaaggggggacggagaaggctatgttggccgggcgacggttgtcccggtttaagcgtgtaggctggttttccaggcaaatccggaaaatcaaggctgaggcgtgatgacgaggcactacggtgctgaagcaacaaatgccctgcttccaggaaaagcctctaagcatcaggtaacatcaaatcgtaccccaaaccgacacaggtggtcaggtagagaataccaaggcgcttgagagaactcgggtgaaggaactaggcaaaatggtgccgtaacttcgggagaaggcacgctgatatgtaggtgaagtccctcgcggatggagctgaaatcagtcgaagataccagctggctgcaactgtttattaaaaacacagcactgtgcaaacacgaaagtggacgtatacggtgtgacgcctgcccggtgccggaaggttaattgatggggtcagcgcaagcgaagctcttgatcgaagccccggtaaacggcggccgtaactataacggtcctaaggtagcgaaattccttgtcgggtaagttccgacctgcacgaatggcgtaatgatggccaggctgtctccacccgagactcagtgaaattgaactcgctgtgaagatgcagtgtacccgcggcaagacggaaagaccccgtgaacctttactatagcttgacactgaacattgagccttgatgtgtaggataggtgggaggctttgaagtgtggacgccagtctgcatggagccgaccttgaaataccaccctttaatgtttgatgttctaacgtggacccgtgatccgggttgcggacagtgtctggtgggtagtttgactggggcggtctcctcctaaagagtaacggaggagcacgaaggttggctaatcctggtcggacatcaggaggttagtgcaatggcataagccagcttgactgcgagcgtgacggcgcgagcaggtgcgaaagcaggtcatagtgatccggtggttctgaatggaagggccatcgctcaacggataaaaggtactccggggataacaggctgataccgcccaagagttcatatcgacggcggtgtttggcacctcgatgtcggctcatcacatcctggggctgaagtaggtcccaagggtatggctgttcgccatttaaagtggtacgcgagctgggtttagaacgtcgtgagacagttcggtccctatctgccgtgggcgctggagaactgaggggggctgctcctagtacgagaggaccggagtggacgcatcactggtgttcgggttgtcatgccaatggcactgcccggtagctaaatgcggaagagataagtgctgaaagcatctaagcacgaaacttgccccgagatgagttctc

SEQ ID NO: 1607 - DNA, 3703 bp, Escherichia coli
  Strain O55:H7
  modified_base (3698)..(3701): a, c, g or t
cctttaagggtcctgaaggaacgttgaagacgacgacgttgataggccgggtgtgtaagcgcagcgatgcgttgagctaaccggtactaatgaaccgtgaggcttaaccttacaacgccgaaggtgttttggcggatgagagaagattttcggcctgatacagattaaatcagaacgcagaagcggtctgataaaacagaatttgcctggcggccgtagcgcggtggtcccacctgaccccatgccgaactcagaagtgaaacgccgtagcgccgatggtagtgtggggtctccccatgcgagagtagggaactgccaggcatcaaattaagcagtaagccggtcataaaaccggtggttgtaaaagaattcggtggagcggtagttcagtcggttagaatacctgcctgtcacgcagggggtcgcgggttcgagtcccgtccgttccgccaccctaattaggggcgtagttcaattggtagagcaccggtctccaaaaccgggtgttgggagttcgagtctctccgcccctgccagaaatcatccttagcgaaagctaaggattttttttatctgaaataaccctctctgaagtaaatccttctaccggcatccttgccagccattcagattaatacacttcatccagcacgttaattttcaatagatcgcgaatcaacgtatttttatcgctattttgcagccatatggcataaagcggccgtgaaagtgttgtgctatcgacaacggtatgcaggccgccttttttacgcgcccagctgacgggtagccaggtgcaaccattaagcatcgcaatctgttgctgtgccagttcagcagaactggttgtcagaatgggcacttcgtcagcaccgatcaaacctgcctcatgctgttgaaaatctggcccccactccagtcgcagatagttaagatctccctttagtttagaaggggcactggtataaagcgctaaagtgaaataccccagcaactgactactaaattcgtccattttgggcgcttcagtggtaataagaagatcaagctggcgttcatgcagctgttttaccagagactgccgttgggcaattcgcgcttcgaactgtaagcctgtatgggcatcctgattttgatacaaacgtcccagccactgattaagcatacattcccacaatgaggcgctggcaccgatagaaaactcgttatgtcgtgaggtatgcgccacctccttacgggcggcctgccaggtgctcatgagcgtttctgcataaggcagtagtttttcaccggcagcggttaaacggatattgtttctgtggcgggtgaaaaggttcacacccagttgattttccagttgtctgattcgaaagctcactgctgactgggtcagatagagcgattcagccgctcgaccaaagtgacgcgttcggctaacttccaggaaagtttttaacaattccgtatccacagtgctctccgcaaaattatttgtcgttatgatttaaatgttttgttttacactctgtcaagcgtaactaatactccgcgccataactagctcggtcaaagaattaggagcgtgcaggatggcggaaagctttacgacgactaatcgatatttcgacaataaacattatccacgtggattctctcgccatggtgatttcaccatcaaagaggcacaactgcttgagcgtcatggttatgccttcaatgagttggatcttggcaaacgcgagccggttaccgaggaagagaaactcttcgtagcagtatgccgtggcgaacgtgagccagtgacagaagcagaacgcgtgtggtccaagtatatgacgcgtatcaagcgtccaaaacgttttcacaccctttccggcggtaaaccgcaggttgaaggtgctgaagactacaccgattctgacgattaataaaaagggcgaaatgccctttttttatgtcagtagtttttgcagatggatgagcaaacggtcaatcgcacgatagctaactgcctcctgcaaatgctgacgtgtgataatgtcagactgatcaatatcagcaatggttcgtgcaactttcaataaccgctgccaggcacgaatcgataaccccagatggatcagcgtttcttccagccactgcgcatcttcgctctcaagcttgcagaatttgcgtatttccggactatccagccaggcgttcaacttattctgccgcttaaattggcgctctctggcagccattacacgttgtttaacggtggtgctgctttctcccggcactaccgttttactcaaaatgccggggggtggtaatgggatctccagtgagagatcgaagcggtcgagaaagggccccgagagccggttgagataacgtaatgtctgttctggcgtgcagcggttatggtttccctgataatgtccggtagggctgggattcatcgccgcaacaagctggaaacgggctggataggttatttttgctcgtgtgcgtgaaagatggatctgcccggattcaatcggctctcgcaaagcatccagtgtacgccgttcaaattcaggtagctcatcaagaaaaagcacgccgttatgcgccaacgaaatttcacctggccctggaattgcaccaccgcccaccatcgcagttaacgacgcactgtgatgaggtgagcggaacgggcgctgccgccattgtttttgtactgattcagcatttaccagacttaatatcgcagcgctctccagtgcctcttcattgcttaaatctggcaaaagaccattaatacggctggcgagcattgttttacctgttcccggcggcccaatcagtaaaaggttgtgcccgccagcggcggtaatttccagtcctcgctttccttgctcctgaccgacaacatcactgagatcatgttgtagcgcccgggatactgcatcagttggtttcgggcgttcgagagcgtgcttaccttccagaaacgcacagacagcttgcagatgatcggctaccaggcatccttcaccgttaattagccccacttcatcttcgttatctttcgcgacgataatttttctgcccgacttaatagcttcagttgcactggagattgcaccgggaacgccacgcagagcgcctgtaagcgccagttctccgactaattcatattcatctaacttattggctgtaagctgttctgaggccgccagcaacgcaatggcgataggtaaatcatatcgtcccccttcttttggtagatcggctggagcaaggttaatggtgatttttttcgccggatattcatatccgctattgataatggcgctgcgcacgcgatcgcgagcttcttttaccgttgtttctggtaagcccaccatcgttaagccgggcaaacctttactgatatgtacctcaacagtgattgggggcgcatttactcccagggctgcgcgggtatgaacaattgacagtgacataagccctccttgagtcaccattatgtgcataagatatcgctgctgtagcccgctaattcgtgaattttagtggctgattcctgtttatttgtgcaagtgaagttgagttgttctggcggtggaatgatgctcgcaaaaatgcagcggacaaaggatgaactacgagggagggaacaacattcgtactgaaattgaatttttttcactcactattttctttttaannnnca

SEQ ID NO: 1608 - DNA, 3222 bp, Escherichia coli
  Strain O55:H7
ttctattgaaattattaaagccatcataaaaaacggccaaaaaatatcttgtgctattcgcaaaatctatggtaactctttaggcattccttcgaacaagatgcaagaaaagacaaaatgacagcccttctacgagtgattagcctggtcgtgattagcgtggtggtgattattatcccaccgtgcggggctgcacttggacgaggaaaggcttagagatcaagccttaacgaactaagacccccgcaccgaaaggtccgggggttttttttgaccttaaaaacataaccgaggagcagacaatgaataacagcacaaaattctgtttcccaagattcaggacggggaactaactatgaatggcgcacagtgggtggtacatgcgttgcgggcacagggtgtgaacaccgttttcggttatccgggtggcgcaattatgccggtttacgatgcattgtatgacggcggcgtggagcacttgctgtgccgacatgagcagggtgcggcaatggcggctatcggttatgcccgtgctaccggcaaaactggcgtatgtatcgccacgtctggtccgggcgcaaccaacctgataaccgggcttgcggacgcactgttagattctatccctgttgttgccatcaccggtcaagtgtccgcaccgtttatcggtactgacgcatttcaggaagtggatgtcctgggattgtcgttagcctgtaccaagcacagctttctggtgcagtcgctggaagagttgccgcgcattatggctgaagcattcgacgttgccagctcaggtcgtcctggtccggttctggtcgatatcccaaaagatatccagttagccagcggcgacctggaaccgtggttcaccaccgttgaaaacgaagtgactttcccacatgccgaagttgagcaagcgcgccagatgctggcaaaagcgcaaaaaccgatgctgtacgttggtggtggcgtgggtatggcgcaggcagttcctgctttacgagaatttctcgctaccacaaaaatgcctgccacctgcacgctgaaagggctgggcgcagttgaagcagattatccgtactatctgggcatgctgggaatgcatggcaccaaagcggcgaacttcgcggtgcaggagtgcgacttgctgatcgccgtgggtgcacgttttgatgaccgggtgaccggcaaattgaacaccttcgcaccacacgccagtgttatccatatggatatcgacccggcagaaatgaacaagctgcgtcaggcacatgtggcattacagggtgatttaaatgcgctgttaccagcattacagcagccattaaatatcaatgactggcagcaatactgcgcgcagctgcgtgatgaacatgcctggcgttacgaccatcccggtgacgctatctacgcgccgttgttgttaaaacaactgtcggatcgtaaacctgcggattgcgttgtgaccacagatgtggggcagcatcagatgtgggccgcgcagcacatcgcacacactcgcccggaaaatttcattacctccagcggcttaggcaccatgggttttggtttaccggcggcggttggcgcgcaagtcgcgcgaccaaacgataccgtcgtctgtatctccggtgacggctctttcatgatgaatgtacaagagctgggcaccgtaaaacgcaagcagttaccgttgaaaatcgtcttactcgataaccaacggttagggatggttcgacaatggcagcaactgtttttccaggaacgatacagcgaaaccacccttaccgataaccccgatttcctcaagttagccagcgccttcggcatccctggccaacacatcacccgtaaagaccaggttgaagcggcactcgacaccatgctgaacagtgatgggccatacctgcttcatgtctcaatcgacgaacttgagaacgtctggccgctggtgccgcctggtgccagtaattcagaaatgttggagaaattatcatgatgcaacatcaggtcaatgtatcggctcgcttcaatccggaaaccttagaacgtgttttacgcgtggtgcgtcatcgtggtttccacgtctgctcaatgaatatggccgccgccagcgatgcacaaaatataaatatcgaattgaccgttgccagcccacggtcggtcgacttactgtttagtcagttaaataaactggtggacgtcgcacacgttgccatctgccagagcacaaccacatcacaacaaatccgcgcctgagcgcaaaaggaatataaaaatgaccacgaagaaagctgattacatttggttcaatggggagatggttcgctgggaagacgcgaaggtgcatgtgatgtcgcacgcgctgcactatggcacctcggtttttgaaggcatccgttgctacgactcgcacaaaggaccggttgtattccgccatcgtgagcatatgcagcgtctgcatgactccgccaaaatctatcgcttcccggtttcgcagagcattgatgagctgatggaagcttgccgtgacgtgatccgcaaaaacaatctcaccagcgcctatatccgtccgctgatcttcgttggtgatgttggcatgggcgtaaacccgccagcgggatactcaaccgatgtgattatcgccgctttcccgtggggagcgtatctgggcgcagaagcgctggagcaggggatcgatgcgatggtttcctcctggaaccgcgcagcaccaaacaccatcccaactgcggcaaaagccggtggtaactatctctcttccctgctggtgggtagcgaagcgcgccgccacggttatcaggaaggtatcgcgctggatgtgaacggttatatctctgaaggcgcaggcgaaaacctgtttgaagtgaaagatggtgtgctgttcaccccaccgttcacctcctccgcgctgccgggtattacccgtgatgccatcatcaaactggcgaaagagctgggaattgaagtgcgtgagcaggtgctgtcgcgcgaatccttgtacctggcggatgaagtctttatgtccggtacggcggcagaaatcacgccagtgcgcagtgtagacggtattcaggttggcgaaggccgttgtggcccggtcaccaaacgcattcagcaagccttcttcggcctctttaccggcgaaaccgaagataaatggggctggttagatcaagttaatcaataaatacaaaaaat

SEQ ID NO: 1609 - DNA, 2809 bp, Escherichia coli
  Strain O55:H7
  modified_base (156)..(159): a, c, g or t
  modified_base (816)..(819): a, c, g or t
  modified_base (1351)..(1351): a, c, g or t
ccgtcccatttacgagacagacactgggagtaaataaagtatgcctaagtaccgttccgccaccaccactcatggtcgtaatatggcgggtgctcgtgcgctgtggcgcgccaccggaatgaccgacgccgatttcggtaagccgattatcgcggnnnngaactcgttcacccaatttgtaccgggtcacgtccatctgcgcgatctcggtaaactggtcgccgaacaaattgaagcggctggcggcgttgccaaagagttcaacaccattgcggtggatgatgggattgccatgggccacggggggatgctttattcactgccatctcgcgaactgatcgctgattccgttgagtatatggtcaacgcccactgcgccgacgccatggtctgcatctctaactgtgacaaaatcaccccggggatgctgatggcttccctgcgtctgaatattccggtgatctttgtttccggcggcccgatggaggccgggaaaaccaaactgtccgatcagatcatcaagctcgatctggttgatgcgatgatccagggcgcagacccgaaagtatctgactcccagagcgatcaggttgaacgttccgcatgcccaacctgcggttcctgctccgggatgtttaccgctaactcaatgaactgcctgaccgaagcgctgggtctgtcgcagccgggcaacggctcgctgctggcaacccactctgaccgtaagcagctgttcctcaatgctggtaaacgcattgttgaattgaccaaacgttactacgagcaaaacgacgaaagtgcactgccccgcaatannnntagcaaagcggcgtttgaaaatgccatgacgctggatatcgcgatgggtggatcgactaacaccgtacttcacctgctggcggcggcgcaggaagcggaaatcgacttcaccatgagtgatatcgataagctttcccgcaaggttccgcagttatgcaaagtcgcgccgagcacccaaaaataccatatggaagatgttcaccgtgctggtggtgttatcggtattctcggcgagctggatcgtgcggggttactgaaccgtgatgtgaaaaacgtacttggcctgacgttgccgcaaacgctggaacaatacgacgttatgctgacccaggatgacgcggtaaaaaatatgttccgcgccggccctgcgggtatccgtaccacccaggcattctcgcaagattgccgttgggatacgctggacgacgatcgcgccaatggctgtatccgctcgctggaacacgcctatagcaaagacggcggcctggcggtgctctacggtaatttcgcggaaaacggctgcatcgttaanactgcgggcgtcgatgacagcatcctcaaattcaccggcccggcgaaagtgtacgaaagccaggacgacgcggtagaagcgattctcggcggtaaagttgtcgccggagatgtggtagtaattcgctatgaaggcccaaaaggtggtccggggatgcaggaaatgctctacccaaccagcttcctgaaatcaatggggctcggtaaagcctgtgcgctgatcaccgacggtcgtttctctggcggcacctctggcctttctatcggccacgtctcaccggaagcggcaagcggcggcagcattggcctgattgaagacggcgacctgatcgccatcgacattccgaaccgtggcattcagttacaggtaagcgatgccgaactggcggcgcgtcgtgaagcgcaggaagctcggggtgacaaagcctggacgccgaaaaatcgtgaacgtcagatctcctttgccctgcgtgcttatgccagcctggcaaccagcgccgacaaaggcgcggtgcgcgataaatcgaaactggggggttaataatggctgactcgcaacccctgtccggtgccccggaaggtgctgaatatttaagagcggtgctgcgcgcgccggtctacgaagcggcgcaggtcacgccgctacaaaaaatgaaaagctctcgtctcgtcttgataacgtgattctggtgaagcgcgaagatcgccagccagtgcacagctttaagctgcgcggcgcatacgccatgatggcgggcctgacggaagaacaaaaagcgcacggcgtgatcactgcttctgcgggtaaccacgcgcagggcgtcgcgttttcttctgcgcggttaggcgtgaaggccctgatcgttatgccaaccgccaccgccgacatcaaagtcgacgcggtgcgcggcttcggcggcgaagtgctgctccacggcgcgaactttgatgaagcgaaagccaaagcgatcgaactgtcacagcagcaggggttcacctgggtgccgccgttcgaccatccgatggtgattgccgggcaaggcacgctggcgctggaactgctccagcaggacgcccatctcgaccgcgtatttgtgccagtcggcggcggcggtctggctgctggcgtggcggtgctgatcaaacaactgatgccgcaaatcaaagtaatcgccgtagaagcggaagactccgcctgcctgaaagcagcgctggatgcgggtcatccggttgatctgccgcgcgtggggctgtttgctgaaggcgttgcggtaaaacgtatcggcgacgaaaccttccgtttgtgccaggagtatctcgacgatatcatcaccgtcgatagtgatgcgatctgtgcggcgatgaaggatttattcgaagatgtgcgcgcggtggcggaaccctctggcgcgctggcgctggcgggaatgaaaaaatatatcgcccagcacaacattcg

SEQ ID NO: 1610 - DNA, 19200 bp, Escherichia coli
  Strain O55:H7
  modified_base (10)..(10): a, c, g or t
  modified_base (3153)..(3153): a, c, g or t
  modified_base (4244)..(4247): a, c, g or t
  modified_base (4585)..(4585): a, c, g or t
  modified_base (11177)..(11177): a, c, g or t
  modified_base (11241)..(11241): a, c, g or t
  modified_base (16497)..(16497): a, c, g or t
  modified_base (16637)..(16637): a, c, g or t
  modified_base (18760)..(18760): a, c, g or t
tgccgtggcncatattctttccggtgccaacgtgaacttccacggcctgcgctacgtctcggaacgctgcgaactgggcgaacagcgtgaagcgttgttggcggtgaccattccggaagaaaaaggcagcttcctcaaattctgccaactgcttggcgggcgatcggtcaccgagttcaactaccgttttgccgatgccaaaaacgcctgcatctttgtcggcgtgcgcctgagccgcggcctcgaagagcgcaaagaaattttgcagatgctcaacgacggcggctacagcgtggtggatctctccgacgacgaaatggcgaagttgcatgtgcgctatatggtcggcgggcgtccgtcacatccgttgcaggaacgcctctacagcttcgaattcccggaatcaccgggcgcgctgctgcgcttcctcaacacgctgggtacgcactggaacatttctttgttccactatcgcagccatggcaccgactacgggcgcgtactggcggcgttcgaacttggcgaccatgaaccggatttcgaaacccggctgaatgagctgggctacgattgccacgacgaaaccaataacccggcgttcaggttctttttggcgggttagggaaaaatgcctgatagcgcttcgcttatcaggcctactcgcgcgacaacgtcatttgtggttcggcaaaatcctccagaacgcctcaatcagcggctcatgcagccgctttttttgtgcacacacgcccagttcaaacggcgttttctcatcgctgcgatctaaaatcattacccggttgcgtacaggctccgggctgttttccagcaccacttccggcaacagcgccacaccacagccgagcgccaccatcgataccatcgcttcatgcccgccaaccgtggcgtaaatcattgggttgctgattttattgcgtcgaaaccacagttcaatgcggcggcgtactggcccctgatcggccatgataaacggtaccgttgaccagtccggcttctctaccgagacctgattacgcaccgggcagggcagcgcgggcgcaatcagcactaccgccagattctccagcatcgaaaacgctacagcgccgggtagcgtctccggtttcccggcaatcgccagatccgcttctcccgtgaccactttttccattgcatctgccgcatcaccagtagtgagtttaatctccaccgacgggtgttccgcgcggaagcgatccagaatcggcggcagatggctgtaggcagcggtcaccgagcagaagatatgtaattcgccagagagcgacggcccttgctgatcgatggtgtggcgcagctgctgatactgcaatagcgtttgctgggcgaaaacgcgcagttcttcgcccgcttcagtcagcgtcaccgtgcggttatcgcgcacaaacagcggctgaccgagatcttcttccaggcgctgaatctgccgtgagagcgtggatgggctaacgtgcatcgcccgcgcgctgcggccaaaatggcggctttccgccagatgcaggaaggttttcagatcgcgtaaatccacagggacagccctcgatgttgacgttgcaaaaattgcaatatgatgttgtgaatatatcaatttccgcaataaatttcctgtcatatagtgaattcaatctcgcaaacgcgaaccgaacaataagaagcacaacatcacgaggaatcaccatggctaactacttcaatacactgaacctgcgccagcaactggcacagttgggcaaatgtcgctttatgggccgcgacgaattcgccgatggcgcgagctaccttcagggtaaaaaagtggtcatcgtcggctgtggcgcacagggtctgaaccagggcctgaacatgcgtgattctggtctcgatatctcctacgctctgcgtaaagaagcgattgccgagaagcgcgcgtcctggcgtaaagcgaccgaaaatggttttaaagtgggtacttacgaagaactgatcccacaggcggatctggtggttaacctgacgccggacaagcagcactctgatgtagtgcacaccgtacagccactgatgaaagacggcgcggcgctgggttactcgcatggtttcaacatcgtcgaagtgggcgagcagatccgtaaagacatcaccgtagtaatggttgcgccgaaatgcccaggcaccgaagtacgtgaagagtacaaacgtggattcggcgtaccgacgctgattgccgttcacccggaaaacgatccgaaaggcgaaggcatggcgatcgctaaagcatgggcggcggcaaccggtggtcatcgtgcgggcgtgctggaatcctctttcgttgcggaagtgaaatctgacctgatgggcgagcaaaccattctgtgcggtatgttgcaggccggctctctgctgtgcttcgacaagctggtggaagaaggcaccgatccggcatacgcagaaaaactgattcagttcggctgggaaaccatcaccgaagcgctgaaacagggcggcatcaccctgatgatggaccgtctctctaacccggcgaaactgcgcgcttacgcgttgtcagaacagctgaaagagatcatggcaccgctgttccagaaacatatggacgacatcatctccggcgaattctcctccggcatgatggcggactgggccaacgatgataagaaactgctgacctggcgtgaagagaccggcaaaaccgcgtttgaaaccgcgccgcagtatgaaggcaaaatcggcgagcaggagtacttcgataaaggcgtactgatgatcgcgatggtgaaagcgggcgttgagctggcgtttgaaaccatggttgattccggcatcatcgaagaatctgcttactatgaatcactgcacgaactgccgctgattgccaacaccatcgcccgtaagcgtctgtacgaaatgaacgtggttatctctgataccgctgagtacggtaactatctgttctcttacgcttgtgtgccgttgctgaaaccgtttatggcagagctgcaaccgggcgatttgggtaaagctattccggaaggtgcggtagataacgcgcaactgcgtgatttgaacgaagcgattcgcagccatgcgattgagcaggtaggtaagaaactgcgcggntacatgactgatatgaaacgtattgctgttgcgggttaatagcgattcagagttcaaggccttctcccggagaaggccttgctattagttacggtacagcaccttaatgatgtggtaaccgaactgggtgtgcagcgggccggttggctccagtaccggacaagagaacacaactttatcgaacgccggaaccatctgaccctggcggaattcacctaaatcaccgccgcgtttgcctgatgggcaaatggagtgtttcttcgccagcttgccaaaatcggccccgttcttaatctgctcgagaagatccagagccagtttctcttcttttacaaggatatgcagtgctgctgctgtttttgccatgatcgtgccttgagtgaataattgtcaggcggcgattttagcatgatccgcagatgctaacgtaattgtcagtcagggaggggctggtacatatatggcaaaagcccggaaaatccgggcttcgcaggtccctcaaggggagaaaacttagggcctctatgggctacaaagtcattatcggggatggtgattttattgtcaatttatgagcgatatggcattgattgacttgatgaccgccctctgtatgtctgcaaccaactcatgtggcaaacattgattaagataccctctgtaagttcttgctctgtttaatctgtttcgactgacttgttgtaccaggtcggttttggcccaacgaatctgctgatcaaagaattgcaggtcattgataacattactggctatttcaacatgcattccacgttttaacttgtcatggtcgcgagtggttgataatggaacgacgatgaatgcgttgccattaatttttccgttgagcacgacaactaacctgttttttatcatttcaggaggaatgcggccatcgtaatacgtcgtgctgaacggtccattttggctaacaggatagttaccaaagttgcattccagtatttcaccaaccttagggctgaaattaatcgccacgagtaaacctctccttagtaaactctgaaaaagtaataacacaacgttacgacccgatattttctaagtctaatggnnnnacgatgaactccgatttcggtcttctctctctgatttaaacatccgcagccaaccggttagcggcttacacgcggtcacattcaaatgcgattctgctacaatcctccccccgttcgaagattgagcaatacacctatgcgtctaaaccccggccaacaacaagctgtcgaattcgttaccggcccctgcctagtgctggcgggcgcgggttccggtaaaactcgtgttatcaccaataaaatcgcccatctgatccgcggttgcggttatcaggcgcggcacattgcggcggtgacctttactaataaagcagcgcgcgagatgaaagagcgtgtanggcagacgctggggcgtaaagaggcgcgtgggctgatgatctccactttccatacgttggggctggatatcatcaaacgcgagtatgcggcgcttgggatgaaagcgaacttctcgttatttgacgataccgatcagcttgctttgcttaaagagttgaccgaggggctgattgaagatgacaaagttctcctgcaacaactgatttcgaccatctctaactggaagaacgatctcaaaactccggcgcaggcggcggcagaggcaaagggcgagcgggatcgtatttttgcccattgttatgggctgtatgatgcacacctgaaagcctgtaacgttctcgacttcgatgacctgattttattgccgacgttgctgctgcaacgcaatgaagaagtacgcgaacgctggcagaacaaaattcgctacctgctggtggatgagtatcaggacaccaacaccagccagtatgaactggtgaaactgctggtgggcagccgcgcgcgctttaccgtggtgggtgacgatgaccagtcgatctactcctggcgcggtgcacgtccgcaaaacctggtgctgctgagtcaggattttccggcgctgaaggtgattaagcttgagcagaactatcgctcttccgggcgtattctgaaagcggcgaacatcctgatcgccaataacccgcacgtctttgaaaagcgtctgttctccgaactgggttacggcacagagctaaaagttttaagcgcgaataacgaggaacatgaagccgagcgcgttactggcgagctgatcgcccatcacttcgtcaataaaacgcagtacaaagattacgccattctttatcgcggcaaccatcagtcgcgggtatttgaaaaattcctgatgcaaaaccgcatcccgtacaaaatatccggtggtacgtcgtttttctctcgtcctgaaatcaaggacttgctggcttatctgcgcgtgctgactaacccggacgatgacagcgcatttctgcgtatcgttaacacgccgaagcgagagattggcccggctacgctgaaaaagctgggtgagtgggcgatgacgcgcaataaaagcatgtttaccgccagctttgatatgggcctgagtcagacgcttagcggacgtggttatgaagcattgacccgcttcactcactggttggcagaaatccagcgcctggcggagcgggagccgattgctgcggtgcgtgatctgatccatggcatggattatgaatcctggctgtacgaaacatcgcccagcccgaaagccgccgaaatgcgcatgaagaacgtcaaccaactgtttagctggatgacggagatgctggaaggcagcgaactggatgagccgatgacgctcacccaggtggtgacgcgctttactttgcgcgacatgatggagcgtggtgagagtgaagaagagctggatcaggtgcaactgatgactctccacgcgtcaaaaggactggagtttccttatgtctacatggtcggtatggaagaagggtttttgccgcaccagagcagtatcgatgaagataatatcgatgaggagcggcggctggcctatgtcggcattacccgcgcccagaaggaattgacctttacgctgtgtaaagaacgccgtcagtacggcgaactggtgcgcccggagccgagccgctttttgctggagctgccgcaggatgatctgatttgggaacaggagcgcaaagtggtcagcgccgaagaacggatgcagaaagggcaaagccatctggcgaatctgaaagcgatgatggcggcaaaacgagggaaataatcaaggccggaaaagatgcgtcagcatcgcatccggcacttactcattaatgcacttccagcggccagtggacatagctctgccactggctttcctgagcaataatctctttacccagcggatgttgggttagccaaccttgcggaagcgtcaaggtcaacagttcatggttagcctgtaatgtcatctctggcacgagatcgtcacggcgacggctggcaaaaatgatggccaggcgtagtaaacggcagagttgttctgcgacgcgcggcggtacggcattttgctgatgcagcgatgagagatcgaccggattagtctggttgagcagtagcgtcgccagcaattttttctgtgcgggggtaaaaccgggaagatccagattacgcaccagataagcagcgtgttgcggcgcttgtttgaagtcaacgctcaggccgatttcatgaagctgacaggcgctgatgagcaaatcgcggcttattgcttcaagatgccattcgttttccacctgatcgaagaagttagccgcaactttggctacgcgctgtgcctgatcaatatcgatcataaagcggcgttgaatattacgcagcgtacggctgcgaatatcctgctcgacggccagatgcaacatgccgtagaccaggccttcacgcagcgcaccgcccgccagggtcatacactgaatattcagttcggtaaaaatggcgatcaggatcgccagaccactcgggaacactaacgcacgttccagcgtcagcccgtcaatctccagttcctccagccgaccgcaatgaatggctcgctgtttcaattgctgcaacttttccagggtaatgcgttcatccatcccctgtgccatcatgatttcctgtaacgcctgcacggtgccggaagcaccaacgcacactttccagccgtgataccgtaattcatcggcaaccggacgtaacacttcgcgtgccgctttttctgcagcatcaaaattttcctgccccagattacgatcggcaaaatagcgttccagccaggtgacgcagcccatcgacaggctgaacaacgaggtggtttgtgcacccgtgccggttaccagttcagtactggcaccgccgatatccactaccaggcgctgatcggcaccgccagtggtgtgagcaacaccctgataaatcagacgtgcttcctcttcaccgctgatcacctgtaccggacaaccgaggatttcctgcgctttggcaataaaatcacccgcattgacggcaaggcgtaacgtcgccgtagcgacaacgcgaatttgcgagggaggaatatcttgcagacgttcagcaaacaggcgcaaacattgccaactgcgctccattgcttcattggagagggcattttcgctattcaggccagcagccagacgcactttgcgttttattcgcgtcagcgtctggatgcttccagccacctcgcgcacaaccagcatatgaaaactattcgaaccgagatcaatggctgcatacagcgacgaggtggaacccatactcttcatccttcaatctgtctctgtgttggctgcattctttcacctgaatcacttactacagtaagctcatcgggattcattctcttgccatcttgatacagtttgaatgattttgagtatgacattttttatttaacctgaacgacgacgattacgcggagcgccagtacgacgcggaccattgcctgtgcgcgggcgcgtgaggcgcagcggttttggcagatcggtcatcaatgcgtccggattgtatttgcttaccggaattgagtgaccaatataggtctcaatagcaggcaaattcaatgcatactcttcacacgccaggctaatagagtgaccgcttgcgcctgcgcgacctgtacgaccaatacggtgaacgtaatcttcacagtcatcgggtaaatcgtagttaaagacgtgcgtcactgccggaatatgcaaaccacgcgcggcaacgtcggtggcaaccagaatatccagatcgccacgggtaaattcatcaagaatacgcagacgttttttctgcgcgacatcgcctgtcaacaaaccgacacgatgaccatctgccgccaggtggccccagatctcttcacaacggtgtttggtattggcgaaaataatcgctctgtctggccactcttcttcgatcagcgtttgcagcaaacgcattttttcttcgttagaagggtagaaaagctcttctttaatacggtggcccgttttctgttccggttccacttcaatatattcggcattgttcatctgctcgaacgccagttcacgtacccggtacgaaagcgtggcggagaacagcatgttgaggcgctggtttgcaggcggcatacggcggaacagccagcggatatctttaataaagcccagatcgtacatgcgatcggcttcgtccagtaccactacctgaatggcaccgaggttaatgtggttctgcttggcgtagtcaattaaacgccccgtggtgccaatcagaatgtcaacgccgctttccagcactttcagctgtttgtcgtaaccatcaccaccgtaagccagacccagcttcaggccggtagcttccgccagcggttccgcatcggcatggatctgcacggcaagttcacgcgtcggtgccataattaaggcacgcggctgattcaccttgcgatcggcaatcgcgggatgagagagaagacaatgaaacgttgacgtaagaaacgccatcgttttcccggtaccggtttgcgcctgcccggctacgtcacgacccgccagcgtcagcggaagggccagtgcctgaatgggcgtacagttatgaaacccttttttttcaagggcttctacaaccttcggatgcagggcgaagtcggaaaacttctgttctgttaaatgtgttttgctcatagtgtggtagaatatcagcttactattgctttacgaaagcgtatccggtgaaataaagtcaacctttagttggttaatgttacaccaacaacgaaaccaacacgccaggcttattcctgtggagttatatatgagcgataaaattattcacctgactgacgacagttttgacacggatgtactcaaagcggacggggcgatcctcgtcgatttctgggcagagtggtgcggtccgtgcaaaatgatcgccccgattctggatgaaatcgctgacgaatatcagggcaaactgaccgttgcaaaactgaacatcgatcaaaaccctggcactgcgccgaaatatggcatccgtggtatcccgactctgctgctgttcaaaaacggtgaagtggcggcaaccaaagtgggcgcactgtctaaaggtcagttgaaagagttcctcgacgctaacctggcgtaagggaatttcatgttcgggtgccccgtcgctaaaaactggacgcccggcgtgagtcatgctaacttagtgttgacttcgtattaaacataccttattaagtttgaatcttgtaatttccaacgcttcccgttttatcttaaatgcgaagtgaacagatttctggctcgtcactcaatccgtcttgtcgtttcagttctgcgtactctcctgtgaccaggcagcgaaaagacatgagtcgatgaccgtaaacaggcatggatgatcctgccataccattcacaacattaagttcgagatttaccccaagtttaagaactcacaccactatgaatcttaccgaattaaagaatacgccggtttctgagctgatcactctcggcgaaaatatggggctggaaaacctggctcgtatgcgtaagcaggacattatttttgccatcctgaagcagcacgcaaagagtggcgaagatatctttggtgatggcgtactggagatattgcaggatggatttggtttcctccgttccgcagacagctcctacctcgccggtcctgatgacatctacgtttcccctagccaaatccgccgtttcaacctccgcactggtgataccatctctggtaagattcgcccgccgaaagaaggtgaacgctattttgcgctgctgaaagttaacgaagttaacttcgacaaacctgaaaacgcccgcaacaaaatcctctttgagaacttaaccccgctgcacgcaaactctcgtctgcgtatggaacgtggtaacggttctactgaagatttaaccgctcgcgtactggatctggcatcacctatcggtcgtggtcagcgtggtctgattgtggcaccgccgaaagccggtaaaaccatgctgctgcagaacattgctcagagcattgcttacaaccacccggattgtgtgctgatggttctgctgatcgacgaacgtccggaagaagtaaccgagatgcagcgactggtaaaaggtgaagttgttgcttctacctttgacgaacccgcatctcgccacgttcaggttgcggaaatggtgatcgagaaggcgaaacgcctggttgagcacaagaaagacgttatcattctgctcgactccatcactcgtctggcgcgcgcttacaacaccgttgttccggcgtcaggtaaagtgttgaccggtggtgtggatgccaacgccctgcatcgtccgaaacgcttcttcggtgcggcgcgtaacgtggaagagggcggcagcctgaccattatcgcgacggcgcttatcgataccggttctaaaatggacgaagttatttacgaagagtttaaaggtacaggcaacatggaactgcacctctctcgtaagatcgctgaanaacgcgtcttcccggctatcgactacaaccgttccggtacccgtaaagaagagctgctcacgantcaggaagaactgcagaaaatgtggatcctgcgcaaaatcattcacccgatgggcgaaatcgatgcaatggaattcctcattaataaactggcaatgaccaagaccaatgacgatttcttcgaaatgatgaaacgctcataaatttgtcttatgccaaaaacgccacgtgtttacgtggcgttttgcttttatatctgtaatcttaatgccgcgctggcgatgttaggaaaattcctggaatttgctggcatgttatgcaatttgcatatcaaatggttaatttttgcacaggactggtgggttcggaacggactttcccttctgaataaaggtcttcgtggttatacttctgctaataattttctctgagagcatgcattgtgaatttactgacagtgagtactgatctcatcagtatttttttattcacgacactgtttctgttttttgcccgtaaggtggcaaaaaaagtcggtttagtggataaaccaaacttccgcaaacgtcaccaggggttgataccactcgttgggggtatttcggtttacgcagggatttgcttcacgttcggaattgtcgattactatattccgcatgcatctctctatctcgcttgtgccggtgtgcttgttttcattggcgcgctggatgaccgttttgatatcagcgtaaaaatccgtgccaccatacaggccgctgttggcattgttatgatggtgtttggcaacctttatctcagtagcctgggttatatctttggctcctgggagatggtgctcggaccgtttggttacttcctgacgctatttgccgtctgggcggccattaatgcgttcaacatggttgatggcattgatggcttgctgggcgggttgtcctgcgtctcgtttgcagcaatcggtatgattttgtggttcgacgggcaaaccagcctcgcaatctggtgctttgcgatgatcgccgccatcctgccatatatcatgcttaaccttggtatcctgggtcgccgctacaaagtctttatgggtgatgcgggcagtacgctgattggttttaccgtgatctggatcctgctcgaaacgacccaaggcaaaacccatcccatcagcccggttaccgctttgtggataatcgccattccgctaatggatatggtggcgattatgtaccgtcgcctgcgtaaaggcatgagcccattctctcctgaccgtcagcatattcaccatttgatcatgcgtgccgggtttacttcccgccaggcgtttgtgctgattacccttgccgcagcactgctcgcttccattggcgtgctggcagaatattctcattttgtcccggagtgggtcatgttggtgctctttttgctagcattcctcctctatggatattgcattaagcgtgcctggaaagttgctcgctttattaagcgcgtaaaacgcagactgcgtagaaatcgtggtggcagccccaatttaaccaaataaatgaggatgtgatgacacaaccaatgcctgggaaaccggccgaagacgctgaaaatgaactggatattcgtgggttgtttcgtaccttgtgggctgggaagctatggattattggcatggggctggcgtttgcgttaatcgcgctggcgtatacgttttttgctcgtcaggagtggagctcgacggcgattaccgatcgtccaacggtgaatatgctggggggatattactcgcagcagcaatttttgcgtaacctggatgtccgttcaaacatggcttctgccgaccaaccatcggtcatggacgaagcctataaagagtttgttatgcaactggcctcgtgggatacccgcagagagttctggctgcaaaccgactattacaagcagcggatggtgggcaacagcaaagccgatgcggcgttgctggatgaaatgattaacaacatccagtttatccccggagactttacccgcgcggtcaatgacagcgtgaagcttattgccgaaaccgcgcctgacgctaataacctgttacgtcagtatgttgcttttgccagccagcgtgcagccagccatctgaatgatgagctgaaaggcgcatgggcggcgcgtaccatccagatgaaagcacaggtgaagcgtcaggaagaggtggcgaaagccatctacgaccgccggatgaacagcattgagcaggcgctgaaaattgctgagcagcataatatttcgcgcagtgcgacagatgtgcctgccgaggaattacctgattcagaaatgttcctgcttgggcgtccaatgctccaggctcgactggaaaatttacaggccgtcggtccggcctttgatctcgactatgatcagaatcgggccatgttaaacaccctgaatgttggtccaaccctggatccgcgttttcagacctatcgctatttgcgtacgccggaagaaccggtaaaacgcgatagcccacgtcgtgccttcctgatgattatgtggggcattgtcggggggctgatcggggctggtgtcgcattaacccgccgttgctcgaaatagcaacactgctgcggtgagcgcaaaggcgctcgccgcttattcgaagagaatcgatgtgaaagtactgactgtatttggtacgcgcccggaagccatcaagatggctccgttggtgcatgcgttggcaaaagatcctttttttgaggctaaagtttgcgtcactgcgcagcatcgggagatgctcgatcaggtgctgaaactcttttccattgtacctgactacgatctcaacataatgcagccaggacagggcctgacagagataacctgtcggattctggaagggctaaaacctattcttgccgagttcaaaccagacgtcgtgctggttcacggcgacacaacgacgacgctggcaaccagcctggcggcgttttatcagcgtattcctgttggtcacgttgaggctggtttacgcacgggcgatctctattcgccgtggccggaagaggctaaccgtacattgaccgggcatctggcgatgtatcatttctctccaaccgaaacttcccggcaaaacttgctgcgtgaaaacgttgcagatagccgaatcttcattaccggtaatacagtcattgatgcactgttatgggtgcgtgaccaggtgatgagcagcgacacgctgcgttcagaacttgcggcaaattacccgtttatcgaccccgataaaaagatgattctggtgaccggtcacaggcgtgaaagcttcggtcgtggctttgaagaaatctgccacgcgctggcagacatcgccaccacgcaccaggacatccagattgtctatccggtgcatctcaacccgaacgtcagagagccggtcaatcgcattctggggcatgtgaaaaatgtcattctgatcgatcctcaggagtatttaccgtttgtctggctgatgaaccacgcctggctgattttgaccgactcaggcggcattcaggaagaagcgccttcgctggggaaaccggtgctggtgatgcgcgataccactgagcgtccggaagcggtgacggcgggtacggtgcgtctggtaggcacggataagcagcgaattgtcgaggaagtgacgcgtcttttaaaagacgaaaacgaatatcaaactatgagccgcgcccataacccgtatggtgatggtcaggcatgctctcgcattctggaagcgttaaaaaataatcggatatcactatgagttttgcgaccatttctgttatcggactgggttacatcgggctgcctacagcagcagcgtttgcctcacggcaaaaacaggtgattggtgtcgatatcaaccaacacgcggttgataccatcaatcgtggcgaaatccatatcgtcgagcctgatttggcgagcgtagtaaaaactgccgtagaaggcggttttttacgagcgagcacgacgccagttgaagcggatgcctggctgattgctgtacccacgccgtttaaaggcgatcatgagccagatatgacctacgttgaatcggctgctcgctccattgcgccagtgctgaaaaaaggcgcgctggtgatccttgaatccacctcgccggtggggtcaaccgagaagatggcagaatggttagcagagatgcgtccggatctcactttcccacagcaggtgggtgagcaggcggacgtcaacattgcttactgcccggaacgcgtgttaccgggccaggttatggtcgagctgattaaaaacgatcgcgtgattggtggtatgacgccggtttgttcggcccgcgccagcgaactgtacaaaattttcctcgaaggtgagtgtgtcgtcactaactcgcggacggcggaaatgtgtaagctcaccgaaaacagcttccgcgatgtgaatatcgcttttgctaatgaattgtcgctgatttgtgccgatcaggggattaacgtctgggaactgattcgcctggcgaatcgtcaccctcgcgttaatattcttcagcctggccctggcgtgggcggtcactgcattgctgttgatccgtggtttatcgtggcacagaacccccagcaggcgcggcttatccgtaccgcgcgcgaagtgaacgatcacaaaccgttctgggttatcgatcaggtgaaagcggcggtggctgattgcctggcggctaccgataaacgcgccagtgaactgaaaatcgcctgctttggtctggcgtttaaaccgaatattgatgacctgcgcgaaagcccggcgatggaaatcgctgaactgatcgcccagtggcatagcggcgaaactctggttgttgagcctaacatccaccagttgccgaaaaaactgaccgggctttgtactctggcgcagcttgacgaggcgctggcaacggcagacgtgctggtgatgctggtcgatcatagtcagttcaaagttatcaatggcgacaatgtccatcagcagtatgtcgtcgatgctaaaggagtctggcgctgatgagaaagattctgataacaggcggtgccgggtttattggctcggcgctggtgcgttatatcatcaacgaaacgagcgacgcggtggtagtggtcgataagctgacctacgccggaaacctgatgtcgctggcaccggtcgcgcaaagcgagcgctttgcctttgagaaagttgatatctgcgatcgggcagaactggcgcgcgtattcactgagcatcagccagactgtgtcatgcatctggcagccgaaagccatgttgaccgttntattgacggcccggcagcgtttattgaaaccaacattgtcgggacttatacattgcttgaagcggcgcgggcttactggaatgtgctgacggaagataaaaaatcagcgttccgttttcatcatatctccactgacgaantatatggtgacctgcactcgacggatgatttcttcaccgaaaccacgccgtatgcgccgagcagcccttattccgcgtcaaaagccagcagcgaccatctggtgcgcgcctggctgcgaacctatggtctgccaacgcttatcaccaactgctcgaataactacggtccttaccactttccggaaaaactgatcccgctgatgatcctcaacgcgctggcgggtaaaccgctaccggtatatggcaacgggcagcaaatccgtgactggctgtatgttgaagatcacgcccgcgcgctgtattgcgtggcgaccaccgggaaagtcggtgaaacctataatattggtggtcacaacgagcgtaagaatctcgatgttgtggaaaccatttgcgagctgctggaagaactggctccgaacaagccgcaaggcgtggtgcattatcgtgacttgatcacctttgtcgctgaccgtccggggcatgatctgcgctatgccattgatgcttcgaaaattgcccgtgaacttggctggctgccgcaggaaacctttgaaagtggaatgcgtaaaacggtgcagtggtatctggctaatgaaagctggtggaagcaggtgcaggacggcagctatcagggcgagcgtttaggtctgaaaggctaattttcagcggaggcaaacatgaaaggtattatcctggcgggcggttccggtacccgattgcatccgattacgcgcggcgtatcgaagcaactgttgccgatttacgataagccaatgatttactatccgctgtcggtgctgatgctggccggtatccgcgaaattctcatcatcactacgccggaagataaaggttatttccagcgcctgctgggcgatggtagtgagttcggtatccagctggaatatgccgaacagcccagcccggacggtctggcgcaggcctttatcatcggtgaaaccttccttaatggtgaaccttcttgtctggtgctgggcgataacatcttcttcggtcagggcttcagtccgaagctgcgtcatgttgcggcgcgcacggaagtggcgacggtttttggctatcaggtgatggacccggaacgctttggcgtggtggagtttgacgataatttccgcgctatctcgctggaagaaaagccaaaacagccgaaatcaaactgggcggtgaccgggctttatttctacgacagtaaagtcgtggagtacgcaaagcaggtgaagccgtcggagcgtggtgaactggagattacctccatcaaccagatgtacctcgaggcgggcaacctgaccgttgaactgctcgggcgcggatttgcctggctggacactggcactcacgacagcctgattgaagccagcacctttgtacagacggtggaaaaacgccagggctttaagattgcctgcctggaagagatcgcctggcgtaacggctggctcgatgacgagggtgtgaagcgtgctgccagttcattagcgaaaactggctacggccaatatctgctggagttacttcgtgcccgtccgcgccagtattgagccactaacctgggaaaacgccttctttggtgttaacagcgccatcgtgcgcattacgtctgaagcaccgttcctgacgccagacgcgttagcgccgtggtcacgggtgcaggccaaaattgcggcatcaaatacgggggaactggatgccctgcaacagctgggattctccctggtagaaggtgaagttgatttggcgctacccgtgaacaatgccagtgatagcggtgctgtagtggcacaagagaccgatattcccgcattacgtcagttagccagcgccgcatttgcgcaaagccgttttcgtgcgccgtggtatgcgcctgacgccagcagtcgcttttatgcacagtggattgaaaatgccgtgcgcggcacctttgatcatcaatgtctgattttacgtgcggcgtccggcgatattcgcggttatgtctctttacgggaactcaatgctacagatgcgcgaattggcctgctggctggacgcggtgcaggtgctgagctgatgcaaacggcgctaaactgggcgtatgctcgcggtaaaacaactttgcgggtggngacccaaatgggcaacaccgccgcgcttaaacgatacatacaaagtggtgcgaatgtagaaagcaccgcgtactggttatacaggtgatcacatgattccatttaacgcaccgccggtggtgggaaccgaactcgactatatgcagtcggcaatgggtagcggcaaactgtgtggcgatggcggttttacccgtcgctgccagcagtggctggagcaacgttttggcagcgccaaagtgttactgacgccgtcctgcaccgcttcgctggagatggcggcgctgctgctcgatatccagcctggcgatgaagtgatcatgccgagctacacctttgtctccaccgccaatgcctttgtgctgcgtggcgcaaaaatcgtttttgtggatgttcgcccggacaccatgaacatcgacgaaacgttgattgaagcggcgatc

SEQ ID NO: 1611 - DNA, 2186 bp, Escherichia coli
  Strain O55:H7
  modified_base (204)..(204): a, c, g or t
gcgttatcgtgccggtgcattacgcgggcgtggcctgcgaaatggacaccattatggcgttggcgaaaaagcataatctgtttgtggtggaagatgctgctcagggcgtgatgtccacttacaaagggcgtgcactgggaaccattggtcatattggctgctttagcttccatgaaaccaaaaactacacggcgggcggtgaangcggcgcgacgctgattaacgataaagcgttgatcgaacgagccgagatcatccgtgaaaaaggcacaaaccgcagccagttcttccgtggtcaggtcgataaatatacctggcgcgatatcggctccagctatttgatgtccgatctgcaagctgcgtacctgtgggcgcaactggaagcagcggatcgtatcaaccagcaacgtctggcgctgtggcaaaactactacgatgcgttagcacctctggcgaaagccgggcgtatcgagctgccgtcgattcccgatggctgcttgcagaacgcgcatatgttttacattaaactgcgggatattgatgaccggagcgcgttgattaactttctgaaagaagcggaaatcatggcggtgttccattacattccgctgcacggttgccctgcgggggaacgctttggtgagttccacggtgaagatcgctacaccaccaaagagagcgagcgcctgctgcgcctgccgctgttctacaacctgtcgcccgtcaatcagcgtacggtaattgcgactttgttgaactacttctcctgatatgtcgttggcaaaagcgtccttgtggacggcggccagtacactggtcaagattggtgccgggttactggtcggtaagttgctggcggtgtcatttggtccggcggggcttgggctggcggcaaatttccgccagttgattaccgtgctcggcgtgcttgccggggctggcatctttaacggtgtaaccaaatacgttgcccagtaccatgataatccgcaacagctgcgccgcgtggtcggcacttcatcagcgatggtacttggcttctctacgctgatggcgctggtttttgtgctggcagctgcgccaatcagcctgggattgtttggtaatcacgactatcaggggctggtgcgtttagtggcgctggtgcaaatggggatcgcctggggcaacctgttactggcgttgatgaaaggctttcgcgatgccgcaggtaatgcgttatctctgattgttggcagcttgattggcgttcttgcgtactacgtcagttaccgtttgggcggatatgaaggggcgttgctgggtctggcgttgattcccgcgctggtggtgattcctgccgccgtcatgttaattaagcgtggtgctatcccgttaagctatctgaaacccagctgggataacggtctggcagggcagttgagcaaatttacgctcatggcgttgattacgtcggtgaccttgcctgttgcttacatcatgatgcgtaaactgctggcggcgcagtatagctgggatgaggtggggatctggcaaggggtgagcagtatttccgatgcctacctgcaatttattacggcatcgttcagcgtatatttgctgcccacgttgtcgcggctaacggaaaagcgcgatatcacccgggaagtggttaaatcgctgaaattcgtcttaccggcagtggcggcggcgagttttaccgtctggttgctgcgtgattttgctatctggctgctgttgtcgaataaatttaccgctatgcgcgatctctttgcctggcagttggtgggtgatgtgttaaaagtgggcgcttatgtctttggttatctggtgatcgccaaagcttcactgcggttttatattctggcggaagtcagccagttcactttattgatggtatttgcccactggctaatccctacgcacggcgcgctgggcgcggcacaggcatatatggcaacctatatcgtctatttttctctttgttgtggcgtgtttttactctggcgtaggcgggcatgactgtactgattcacgtactgggatcggatatccctcaccataaccgaaccgttttgcggtttttcaatgacgcgctggccgcgacgagcgagcacgcgcgcgagtttatggttgttggcaaggacgacggcttaagtgatagctgtccggcgctttctgtgcaa

SEQ ID NO: 1612 - DNA, 6669 bp, Escherichia coli
  Strain O55:H7
  modified_base (3119)..(3119): a, c, g or t
  modified_base (4592)..(4592): a, c, g or t
  modified_base (5619)..(5622): a, c, g or t
  modified_base (6499)..(6499): a, c, g or t
  modified_base (6535)..(6538): a, c, g or t
ctgggaaaaaatcgctggcggaagcggtcatcgcgaaagcaaaagctaaccgtcagcagcgttttttcttccacggtcagttcaatcccacactgtggctggctctgctgagtggtggcattaagcccagccagttttactggcatatctggggggcagacctgtacgagctttccagtggcttgagatataagcttttttacccactacgtcgcctggcgcaaaagcgagtcggctgtgtatttgccacccgtggtgatttgagcttttttgccaaaacgcacccaaaggtgcggggcgaactgctgtacttcccgacgcggatggatgcttctctcaatacgatggcgaacgatcggcaacgtgaagggaaaatgaccattctggtggggaactccggcgaccgcagcaatgagcatattgctgccttgcgcgccgttcatcagcaatttggcgatacggtaaaagtggtggtgccgatgggatatccgcctaataacgaagcgtacatcgaggaagttcgtcaggcggggctggagttattcagcgaagaaaatctgcaagttctgagtgaaaaactggaatttgacgcctatctgacgctacttcgtcagtgcgatcttggttactttatttttgcccgccagcagggcattggtacgctgtgcttactgattcaggcgggcattccttgtgtgcttaaccgggaaaatccgttctggcaggatatgacggaacagcatttaccggtgctgtttactaccgacgatctcaacgaggatattgtgcgtgaagcgcagcgccagttggcgtcggtggataaaaacaccattgccttctttagccctaactatctacaaggctggcagcgggcgttggcgattgccgccggggaggtcgcatgagtctgctgcaattcagtggcctgtttgttgtctggctgctctgcacgctgtttattgccacgctgacctggtttgagtttcgtcgtgtgcgctttaacttcaatgtattcttttcattgctgtttctgctcacctttttctttggcttcccgctgaccagcgtgctggtgtttcgctttgatgttggtgtcgcgccgccagaaatcctgttgcaggcgttgctttctgcgggctgcttctacgcggtttactacgtcacctacaaaacccgcctacgcaaacgcgttgctgatgtaccgcgccgtccgctgtttaccatgaaccgcgtggaaaccaatcttacgtgggtgatcctgatgggtatcgcgctggtaagcgtcggcatcttcttcatgcacaacggctttttgctgttccggcttaactcctacagtcagatcttttccagtgaagtctccggcgtggcgttaaaacgcttcttttactttttcatcccggcgatgctggtggtctactttctgcgccaggacagcaaagcgtggctgtttttcctcgtcagcacggtcgcctttggcttgctgacttatatgattgtcggcggcactcgcgccaatatcatcatcgcattcgctatcttcctgtttattggcattattcgcggctggatttcgttgtggatgctggcggcggcgggcgtgctggggattgttggcatgttctggctggcgctaaaacgctatggaatgaatgtgagcggcgatgaagcgttctatacgtttctctatctcactcgcgacaccttctcgccgtgggagaatctggcgttgctgttgcagaactacgacaacatcgacttccagggcctggcgccaattgtccgcgatttctatgtctttatcccttcctggctgtggccgggtcgcccgagtatggtgctgaactcagccaactactttacctgggaagtgctgaataaccactccggactggcgatctcgcctacgcttataggctcactggtggtgatgggcggcgcgttgttcatcccgctcggggcgattgtggttggactgatcatcaaatggttcgactggctgtatgagctgggcaaccgcgaaactaatcgctataaggctgcgatattgcacagtttctgctttggggcgatcttcaatatgatcgtgctggcgcgtgaagggctggattcgtttgtctcacgcgtggtcttttttatcgtggtcttcggcgcatgtctgatgatcgcaaaactgttgtactggctttttgaaagcgccggactcattcataaacgtacaaaatcatcgctccggacgcaggttgaaggataacaatgaataacaacaccacggcaccgacctatacgctgcgtggcttacagttgattggttggcgtgatatgcagcatgccctcgattatctgtttgctgacgggcagcttaagcagggaacgctggttgccattaatgctgaaaaaatgctgaccattgaagagaacgccgaggtcagggagttaattaacgctgccgaatttaaatatgcggatggcatcagcgttgtacgttcagtacgtaaaaagtacccgcaggcgcaggtttcccgcgttgccggtgccgatctctgggaagagctgatggcgcgcgcaggcaaagaagggacgacggtatttcttgtgggcggtaaacctgaagtgctggcgcaaactgaagctaaactgcgcaaccagtggaatgtgaatatcgttggcagtcaggatggttattttaaacccgagcagcgtcaggcgctgtttgaacgcattcatgccagcggagcgcaaatcgtcaccgttgcgatgggatcgccaaagcaggagatcttcatgcgcgactgccgtctggtgcatccagatgcgctgtatatgggcgttggcgggacttacgatgttttcaccggtcacgtaaaacgcgcaccgaaaatctggcaaacgctggggctggagtggctctaccgcctgctttcgcagccgagccgcattaagcgtcagcttcgtttgctgcgttatttacgctggcattacaccggcaacctctgattttcctctctttgtaaagcgacggagtggtcactccgtcgcctgtctgcttttttattacacaaagcattcaaatttttaatgctttatttgccatttctcctgaattacgaaaacatttncaacactcgatgtacccataacgataaccggtaacaccggaaagcatgcaaacacaacacgaggatttatggcagataacaaaccagagctacagcgtgggctggaagctcgacatatcgaactcatcgccctggggggcaccattggcgtcggcctgtttatgggggccgccagtaccctgaaatgggccgggccatccgtattgttggcctatatcatcgccgggctgttcgtctttttcatcatgcgttcaatgggcgaaatgttgttcctcgaaccggttaccggttcgttcgccgtttatgcgcatcgttatatgagcccgttctttggctatctcaccgcctggtcttactggtttatgtggatggcggtggggatctctgaaatcaccgccattggcgtttatgtccagttctggttcccggagatggcgcagtggatacccgcattgatcgcagtggcgctggtggcgttggcgaatctggcagcggtgcggttgtacggcgaaatcgagttctggttcgcgatgatcaaagtcaccacgattatcgtgatgattgtcattggcctgggcgtgattttctttggctttggcaatggcgggcagtcgattggttttagcaatctcacagagcatggcggtttctttgcgggtggctggaaagggttcctgaccgcgctgtgtattgtggtggcgtcctaccagggcgtggagctgattggcattactgccggtgaagcgaagaatccgcaggtgacgctgcgcagtgccgtaggcaaggtgctgtggcggatcctgattttctacgttggcgcgattttcgttatcgtcaccatcttcccgtggaatgaaataggcagcaacggcagcccgttcgtactgacttttgccaaaatcggtattaccgcagcggcgggcattatcaactttgtggtgctgacggctgcgctctctggctgtaacagcggcatgtacagttgcggacgtatgctctacgcactggcgaaaaaccgtcagttaccggcggcgatggcgaaagtttcccgtcacggcgtaccggttgcgggtgtggcagtatctattgctattctgctaattggctcatgcctgaactacatcattcccaatccgcagcgtgtgtttgtctacgtctacagtgccagcgtgcttccggggatggtgccatggtttgtgatattgataagccagctgcgttttcggcgtgcacataaagcggcgattgccagccatccgttccgctcaatcctgttcccgtgggccaactacgtaacaatggcattcctgatttgcgttttgatcggcatgtactttaatgaagatacgcgtatgtcgctgtttgttggcatcatctttatgctggcggtgacggcgatttataaagtttttggccttaatcgccacgggaaagcgcataaactggaggaataagcagcaaaacgcacaaacngtaaccaaacgcgcaatttatttaaaaagggactagacagaggggtgggaagtccgtattatccacccccgcaacggcgctaagcgcccgtagctcagctggatagagcgctgccctccggaggcagaggtctcaggttcgaatcctgtcgggcgcgccatttagtcccggcgcttgagctgcggtggtagtaataccgcgtaacaagatttgtagtggtggctatagctcagttggtagagccctggattgtgattccagttgtcgtgggttcgaatcccattagccaccccattattagaagttgtgacaatgcgaaggtggcggaattggtagacgcgctagcttcaggtgttagtgtccttacggacgtgggggttcaagtcccccccctcgcaccacgactttaaagaattgaactaaaaattcaaaaagcagtatttcggcgagtagcgcagcttggtagcgcaactggtttgggaccagtgggtcggaggttcgaatcctctctcgccgaccaattttgaaccccgcttcggcggggttttttgttttctgtgcatttcgtcaccctcccttcgcaataaacgcccgtaataactcattgccccacggtatgatttcgcccttaacgtattgaaggatgacttcaggcaaggagcgaccatgctgcaacaggttccaacgcgtgcttttcatgtgatggcgaaaccgagcggttccgattgtaatctgaactgtgactactgtttttatctcgaaaaacaatccctttaccgcgaaaagccagtcacgcatatggacgatgacacgctggaagcgtatgtccgtcactatatcgctgccagcgaaccgcaaaacgaagtggcttttacctggcagggcggcgaaccaacgctactcgggctggagttttaccgccgtgccgtggcgctacaggcgaaatatggtgctggcaggaagataagtaacagcttccagactaacggcgtactgctcgatgatgaatggtgtgcatttctggcannnnatcattttcttgttgggttatcgctggatggtccggctgagatccacaatcaatatcgcgtgacaaaaggcggcagacccacgcataaactggtgatgcgtgccctgacgctcctgcaaaaacatcatgtcgactataacgtgctggtctgcgtcaaccgcaccagcgcgcagcaaccgttacaggtttatgattttttgtgcgatgcgggagtcgaattcatccagtttattccggtggtcgagcgcctggctgatgaaacgactgcccgcgaaggactgaaactacatgcgcctggtgatattcagggggaactgacggaatggtctgtgcgccccgatgaatttggtgaatttctggtggcgatattcgaccactggattaaacgcgacgtcggcaagattttcgtgatgaatatcgaatgggcgtttgccaattttgtcggtgcgccgggtgcggtttgccatcatcagccaacctgtgggcgctcggtgattgttgagcacaatggcgacgtttacgcctgcgatcactatgtttatccgcaatatcgactggggaatatgcaccagcaaacaattgcagaaatgatcgattccccgcaacagcaggtgtttggtgaagataaatttaagcaattaccggcgcagtgtcgcagttgtaacgtgttaaaagcatgttggggaggctgcccgaaacaccgcttcatgctcgatgccagcggcaaaccgggactgaattatttgtgtgccgggtatcagcgttatttccgccatctaccgccatatcttaaagcaatggctgatttgctggcgcacggtcgcccggccagcgacattatgcaggcgcatttgctggtggtgagtaagtaaaaaancggccattttgtggtcgcctgcggttgattgccggnnnncggcgtaaacgccttatccggcctacatgatcgtgcaaattcaataaattgcagcgttctgtaggctggataagatgcgtcagcatcgcatccggcaaaggcagatctcagcgatagcgccggcttaatca

SEQ ID NO: 1613 - DNA, 1817 bp, Escherichia coli
  Strain O55:H7
  modified_base (103)..(103): a, c, g or t
ctgcgcgcgtggtggatactttttcaggatctccatatacgcgtgcatttcggtctgtagcggtacacccatcggaatatggcgcacgccgatagagtcgctntcctgcggatcggtgtagaggttaaacaccgacgatccggctgtttgcattactgtgccggtgaatccaccctgatatccgctctgggtataagcgtaaggttgctgaatcaggacgtgatacttgaattcatccatacgcacagcagcgagtttaccgttgaggaagtagtgctcggccttacggttagactgaccatttgttcccaggaagaaagatgtctggtccacaccatcgataaaggtggttttcggcactaaattcgccactttcgcaccaggatgccccgccagatccagtgctgttgggaagagatctgccagatcaacaataccgtcagatttacgcggttggatcatgcctttccagtaaacgaaagtcggtacgcgaacgccgccttcccaggtagctcctttcgcaccacggaacggtgtgcgtccgtgcggcggtacttcggcttccggtccgttatcggaggtaaagacaatcagcgtgttatcaagctgaccgtttttctccagtgctttatacagattagcgaacacatcgttcatttccaccatgcagtcgccatacgaggtgcgtgccggagagctacccgcatatttggcgttcgggtagttatcgaagtgacagccgcgagtgccgtaatagaggaagaaaggcttatcactcttcgccatcttgtcgaggaacttaacgccatattccatccagcgttgatccagatcttccatatatttcggcgtaatgtcggcaatggcctgttgttcgccgccgcgcaccgcatgaacgtcatctttgctaaatggtaattgcttgatgtattcagaacggtccggactcagggccacttccggattgacgtgagcgtcgcgccattcggtgtacatatcagacaccgagttaaagccacggaaatcatcaaagccaacgttctgcggctgcgactctttgttttcccccatatgccatttcccgatggcctgagtgacgtagccctgatcgtgcagcaactgcggcagcgtggttaacccttgcagcccgcccggttgcccgtacattggcggcatcagaatgccgtggtggatggagtattgtccggtgagaatggtggcgcgggttggggaagagcttggttgagaatacgccgaagttaaaatcagcccctggctggcaacggcgtcgatatctggtgtagggttacccaccgccacgccgccaccgttaaaaccgacgtccatccagcccacatcgtccagcaagaaaacaaccacattcggtttcttaccggtttttttctcaagttctgccagcttctgctgggtttctttatcctgcgccggatgctgcattactggcatcatgttgtcggcaatagtggtcgccggtttaaccagatactggtttgggtgatcgtatccggcaaagcctttgcgcgcggtggcagttgacggggtatctgctgcgctggccatgagaggaagagcggcggcgacagcaacaacaagaagtttgggtgaaaacgaaaattccatgcaaaatgctccggtttcatgtcaacaaaatgatgacgtaattaagcattgataattgagatccctctccctgacaggatgattacataaataatagtgataaaaataaattatttatttatccaagaaatgaatttaaaaatcaggagagcgttttcaatcctacctctggcgca

SEQ ID NO: 1614 - DNA, 9500 bp, Escherichia coli
  Strain O55:H7
  modified_base (1420)..(1420): a, c, g or t
  modified_base (3782)..(3785): a, c, g or t
  modified_base (4445)..(4445): a, c, g or t
  modified_base (4494)..(4494): a, c, g or t
  modified_base (4586)..(4586): a, c, g or t
  modified_base (4958)..(4961): a, c, g or t
  modified_base (5591)..(5591): a, c, g or t
  modified_base (5999)..(5999): a, c, g or t
  modified_base (6481)..(6481): a, c, g or t
  modified_base (8584)..(8584): a, c, g or t
  modified_base (9243)..(9243): a, c, g or t
atatgtaaggcaggtttattatatcgcgttgattattgatgctgtttttagttttaacggcaattaatatatgtgttattaattgaatgaattttatcattcataataagtatgtgtaggatcaagctcaggttaaatattcactcaggaagttattactcaggaagcaaagaggattacagaattatctcataacaagtgttaagggatgttatttcccgattctctgtggcataataaacgagtagatgctcattccatctcttatgttcgccttagtgcctcataaactccggaatgacgcagagccgtttacggtgcttatcgtccactgacagatgtcgcttatgcctcatcagacaccatggacacaacgttgagtgaagcacccacttgttgtcatacagacctgttttaacgcctgctccgtaataagagcaggcgtttttttatgtgtcaggaaggtcccggaggtgcttgcctccgggtgagaaggaactactgtggtgggttgttctgcaacgttaacatcaaaccgtcgcgacgcatcgctgcagcttcttccggcttgtgcagtctgtccagcgcgtcggcaagccatgcgtaatcgtaggcgtccggacgttgtttcagcgctgcgcggaaggcgagcgatgcttcctgccattctccgtgcttcatcagtgactggcccagtgtgctccacaacagcgggcgatcgccgacgtttttgatttgctggcgcagcactttttccagctgttccggattgtttgttttcagtcgaggaatcggcagcagtaggcgatcgtcgtactggcgtttcaggccatcgatgataatttgctgggcagtatcatgatcgtcacattcaataagatgttccgccattgccacctgcaacgctacctgatgacgcgttttccggctttggtttttccaccagttacgcaaaccttcgctaccgttatcggcacgcgcctgatccatcaggccaatccatgcctgttgttccagcattgcacgatgttcttcatcaccaacatgggctttcgccattgatgggataatatccagcagcgaactccatgcacctgtgcggatatacgcctgttccgccagacgtaatacttccggatggcgtggcgtaacttccagcagcttatccacgccgtggcgtgcagcatggttttcattacgggccagttgcagacgtacacgggtgatttctaccggaatggtgtcattgccggccagctccgctgcgcgttccagatgttggttggcgcgcgcttcatcaccacgttgttgcgcggcttcggcagccagtagatagttcaccaccggttgttcagcgtgatcggcatttttcgccatcagcttttcaacttgctgataatcgccttccgccagtttcagnagcgcctgttcggtctgcttacgtgcacggcgacgcttacgcccgacaaaccacccacgggtgtgcgcgccagtgcggaagatccgccgcagtagccactcaatggcaaacagcactaccatcgccagaatcaatatgatcgccaggcccgtgacgctggtttcgatattgtagttgtcggtctggatcagcacataaccctgatgaccggcaatcatcgggccaaccacgatccccgcaatcagcaacacaaagagcaataacacttttagcatggttattctccttgcggcgcggctgccggagtatcagcttgcggtgcaggtgcaggtttagcttccgttgtccccgctgccggttgtgccagcaggttacgcacgcgagtctgcatcagtttttccagcatcgcctggctttgcagggtttccggaagatccatcgagatattttgctggcttaactggtctacctcgtcgaggaacgctttggtggtggcatcatcagtatcgtagtaagcacgtacccaggtggagacgttctccagcgcctggcgataagtctcttgctggtgacgcggtacagcttgtgctgcgaccagcaggcgagagcgaatattttcgcgcagatagatatcctgatttggcgctaacagcggtacggcggtgtcatcacgacggcgaatcgtaatgaagttgtccataaagttctgccagcttttttgcagattgatacgccattcgctgatggaactggaaagctcttcaccgtcggaatccatcggcgaaccatcgctgtcattatcggccagacgcaggttatctacctgatttgaaagctgattaagcttaaggatgatgccgtcataatccacctgcgatactgcagaaaggctggcgatatcatcggtaattgcccgacgaacggtaatcagactcgggtcattcatatccgccaggctggcgtctgcacttttcagcaacgctgcagcggtcgtgacgtcctgatcgctccacagcttccgtccggcgagtttcaccagaaaatcggcctgagccagcagccaggttttagcatcgctgccggaaatggtggcgaccttttgttggacttcatccaactgttttgccagcgtttcttgctgacgattcgcctgcttaagctgtgcagcttgttgcttaataatgccttccagctcgactttttggctctcctgggctttttgcaatgccgtcagttggttagccagggcatcgctggtggcggtctgattgacggcctgttgtttaccccagccatacaaaccgacgcccgccgccagagcaatagcgatagccaccgcgctgagaatcaatgcggtattgttcttactctttttttctgttgcgacaggttgtgacgtggtgtccacggcctccctggtctcttcaaccacggcggaggttttttcttgttccgtcattatggcttcctgttatgagagttattgtaatgcccgtaaaagcgcatcgttgtcagcgttatcggcgaccttaatgtcttgccagcccagttcccgggcgagtttcgccaaacgctcactgacgaccaatagtcgacagtgtagtaaccagtgctcacgataccattgtgggatcagcgaccagagttgctgcaacatttcaccgctggtaacaacgaccgtcgtcacctcgcgggattgccagcgcatcgcttcttctgcaccatcgtaatggattgcgcatcgttgataacattcacaaaaagtgacctcagcaccgcgcgccgtcagggtatccccaattagctcacgaccgccattgccacgtaatatcagcgcacgtttgcccgcaatattttgtaattcaggtaattgtagcaagacttcgctgatttcccgatcctgcgggtagagaatcttctgtccgcttacggtatgtagtgccagtgcggtggtgcgtccaatggcgaaataattaggtagtcggggccatttacgatcttgctgatgtagctgtgattgggcaaaagcaaccgcgtgttgcgagagggcaaacaacagatcgctctcccccagcgctgccagttgatcagcaagttgcggtaattgtcgacccggagaaaactcaatcagcggaaaatgccaggccacctgccccagtgtgcgcagacggctcactaactcttctccagcgggagacgggcgggtgacaaggatactcatgccggggcgtctccgttatagacttcagcgaggatctcgcgcgcgccgttattcagtagctcttctgccagcgaaatccccatttgttcggcatcttgcggcgcaccgcggcgttcaccgcgaataatctgcgaaccgtcnnnngcgccgaccagcgcacgcagccagatttcgccatcaataagctcggcgtagctaccaattggcacctgacatccaccttcgagacgggtattcatggcgcgttctgcggtaacgcgcagtgcagtttcgtggtgattcagcgcggcaagcagctcgcgagtgcgtgtatcatcaaggcggcattcaataccgactgcaccttgtcctaccgccggaagagaaatctcgggtggcaacgcggcgcgaatgcgggactccagacctaaacgttttagtccggctacggcaagaatgatggcatcgtattcgccgttatccagtttgctcaggcgagtgccgacgttgccgcgcagggagcggataatcagatccgggcggcgttcagccagttggcactggcgacgtaaactggacgtcccgacgatactgcctgccggtaacgcatccagactgtcatagttattggacacaaaggcatcgcgaggatcttcacgctcacaaatagtgaccaggcccagaccgtgcgggaattcaaccggcacatctttcattgaatgtacggcgatatcggcgcgattttcgaggagcgcgacttccagctcttttacaaataagccttttccgccgactttcgccagcggcgtatcaagaatcacatcnccgcgcgtcaccatcggtaccagttcaacgaccaggcccggatggctcnccatcaacttgtctttgacatagtgtgcctgccagagtgcaagtgggctttggcgtgtggcaattcttaaaacattgtctaacatgcttgtnaccgtcattatcatccgtggtccatcctaacatccttgccagagtgatgtcagtgttgtggtgaaacgtagacgcctgcgcaaaccgtaaaatgaggtctggcagtggatcctgacaggcgtttcacgccgtcgtaataaggaatttacagagaataaacggtgctacacttgtatgtagcgcatctttctttacggtcaatcagcaaggtgttaaattgatcacgttttagaccattttttcgtcgtgaaactaaaaaaaccaggcgcgaaaagtggtaacggttacctttgacatacgaaatatcccgaatgccgcgtgttaccgttgatgttggcggaatcacagtcatgacgggtagcaaatcaggcnnnnacgtcttgtacctctatattgagactctgaaacagagactggatgccataaatcaattgcgtgtggatcgcgcgcttgctgctatggggcctgcattccaacaggtctacagtctactgccgacattgttgcactatcaccatccgctaatgccgggttaccttgatggtaacgttcccaaaggcatttgcctttacacgcctgatgaaactcaacgccactacctgaacgagcttgaactgtatcgtggaatgtcagtacaggacccgccgaaaggtgagcttccaattactggtgtatacaccatgggcagcacctcgtccgtagggcaaagttgttcctctgacctggatatctgggtctgtcatcaatcctggctcgatagcgaagagcgccagttgctacaacgtaaatgcagcctgctggaaagctgggccgcctcgctgggtgtggaagttagcttcttcctgattgatgaaaaccgttttcgccacaacgagagtggcagtctggggggcgaagattgtggctccacccagcatatactgctgcttgatgaattttatcgtaccgccgtgcgtctcgccggtaagcgtattctgtggaatatggtgccgtgcgacgaagaanagcattacgatgactacgtaatgacgctctacgcacaaggcgtgctgacgccaaatgaatggctggatctcggcggcttaagctcgctttccgctgaagaatacttcggtgccagcctttggcaactctacaagagtatcgattctccatacaaagcggtgctgaagacactgctgctggaagcctattcctgggaatacccgaacccacgcctgctggcgaaagatatcaaacagcgtttgcacgacggcgagattgtatcgtttggcctcgatccttactgcatgatgctggagcgtgttactgaatacctgacggcgattgaagatttcacccgtctggatttagtacgtcgctgcttctatttaaaagtgtgcgaaaagctcagccgtgaacgcgcctgcgtangctggcgtcgcgcagtgttgagccagttagtgagcgagtgggggtgggacgaagctcgtctggcaatgctcgataaccgcgctaactggaagattgatcaggtgcgtgaggcgcacaacgagttgctcgacgcgatgatgcagagctaccgtaatctgatccgctttgcgcgtcgcaataaccttagcgtctccgccagtccgcaggatatcggcgtgctgacgcgtaagctgtatgccgcgtttgaagcattaccaggtaaagtgacgctggtaaacccgcagatttcacccgatctctcggaaccgaatctgacctttatttatgtgccgccgggccgggctaaccgttcaggttggtatctgtataaccgcgcgccaaatattgagtcgatcatcagccatcagccgctggaatataaccgttacctgaataaactggtggcgtgggcatggtttaacggcctgctgacctcgcgcacncgcttgtatattaaaggtaacggcattgtcgatttgcctaagttgcaggagatggtcgccgacgtgtcgcaccatttcccgttgcgcttacctgcaccgacaccgaaggcgctctacagcccgtgtgagatccgccatctggcgattatcgttaacctggaatatgacccgacagctgcgttccgcaatcaggtggtgcattttgatttccgtaagctggatgtcttcagctttggcgagaatcaaaattgcctggtaggtagcgttgacctgctgtatcgcaactcgtggaatgaagtgcgtacgctgcacttcaacggcgagcaatcgatgatcgaagccctgaaaactattctcggcaaaatgcatcaggacgccgcaccgccagatagcgtggaagtcttctgttatagccagcatctgcgcggcttaattcgtactcgcgtgcagcaactggtttctgagtgtattgaattgcgtctttccagcacccgccaggaaaccgggcgtttcaaggcgctgcgcgtttctggtcaaacctggggcttgttcttcgaacgcctgaatgtatcggtacagaaactggagaacgccatcgagttttatggcgctatttcgcataacaaactgcacggcctgtcagtgcaggttgaaaccaatcacgtcaaattaccggcggtggtggacggctttgccagcgaagggatcatccagttctttttcgaagaaacgcaagatgagaatggctttaatatctacattctcgacgaaagcaatcgggttgaggtgtatcaccactgcgaaggcagcaaagaggagctggtacgtgacgtcagtcgcttctactcgtcatcgcatgaccgttttacctacggctcaagcttcatcaacttcaacctgccgcagttctatcagattgtgaaggttgatggtcgtgaacaggtgattccgttccgcacaaaatctatcggtaacatgccgcctgccaatcaggatcacgatacgccgctattacagcagtatttttcgtgatgaacgtgccggaaagcgaggcttatccggcatgcaatcttagcggaaactgactgtttcacccgcctgctgcgtcgccgcctgttccagcaaatcccagaaggtttcgccgctgcgatcgcaaatccactcatcgcctttcagatcaaaatggtagccgccttgtttggttgccagccatacctggtgcagcggttcctggcggttgataatgattttgctgccattctcaaaggtaatggtcagcacgccgccgttgatttcgcagtcgatatcgctgtcgccatcccagtcgtccagacgctcttcaatggtcagccacagttgatcagccaggcgatgaaattcactgtcgttcattgttgtatcctgtttttaagtgatggcggcagtatagcggcatggggtcagggcttcaaagtttgcacctctgcggctgcgttacggcatgattcatccgtcaccggaataatgatgtctctgtgtagcgaaagatttgtctcttcattagggcgcagttacaccacgcctttccctgtttctggtaaacattatgatcaggtttaccgagcgagcatcctcacgctgacggaactaaaaaagccaacaaacaaaccacattgcgatagtgcataaagccatcctggcgtgaggtgttgatcacgaaactgccagcagaacataaatcctcacgagtaagcgttatactcgcagcatttcctcacttttcagacttcataaagagtcgctaaacgcttgcttttacgccttctcctgcgatgatagaaagcagaaagcgatgaactttacaggcaatccataatgaaaaacgtgtttaaggcactcactgtattacttactctcttcagcctgacgggctgcggtctgaaaggtccgctctatttcccgcctgcagataaaaatgcaccgccgccgaccaaaccggtagagacgcaaacgcaatccacggtgccggataaaaacgatcgcgccactggcgatggtccatcccaggtgaattactaaaagtcagtttctgtacccgcgtgattggagtaaatgatgcagttntcgaaaatgcatggccttggcaacgattttatggtcgtcgacgcggtaacgcagaatgtctttttttcaccggagctgattcgtcgcctagctgatcggcacctgggggtagggtttgaccaactgctggtggttgagccgccgtatgatcctgaactggattttcactatcgcattttcaatgctgatggcagtgaagtggcgcagtgcggcaacggcgcacgctgctttgcccgttttgtgcgtctgaaagggctgaccaataagcgcgatatccgcgtcagcaccgccaacgggcggatggttcttaccgtcaccgatgatgatctggtccgcgtaaatatgggcgaacccaacttcgaaccttctgccgtgccgtttcgcgctaacaaagcggaaaagacctatattatgcgcgccgccgagcagacaatcttatgcggcgtggtgtcgatgggaaatccacattgcgtgattcaggtcgatgatgtcgatactgcggcggtagaaacactggggcctgttctggaaagccacgagcgttttccggagcgcgccaatatcggttttatgcaagtggttaagcgcgagcatattcgtttacgcgtttatgagcgtggggcaggagaaacccaggcctgcggcagcggcgcatgtgnggcggttgcagtagggattcagcaaggtttgctggccgaagaagtacgcgtggaactcccaggcggtcgtcttgatatcgcctggaaaggtccgggtcacccgttatatatgactggcccggcggtacatgtctacgacggatttattcatctatgaagcaaccaggggaagaactgcaggaaacactcacggagcttgatgaccgggtggttgtcgattatctgattaaaaatcctgagttttttatccgcaatgc

SEQ ID NO: 1615 - DNA, 283 bp, Escherichia coli
  Strain O55:H7
  modified_base (225)..(225): a, c, g or t
cagtagaagcgatacgtgtgccgcatccggtacgcggtaccgtttcgttggtcgagtggcacatggcccgcgcacgtaatcatattcatgttctggaagagaacatggcgctgttgatggaacaggctatcgccaacgaaggcctgttttatcgcttactctacctgcagcgcagtctcaccgccgccagcagtcttgatgatatgctgatgcgctttcaccgcngggcgcgtgatctcggcctggcaggtgcgagtctgcgcctgtttccggatcgctggcg

SEQ ID NO: 1616 - DNA, 6070 bp, Escherichia coli
  Strain O55:H7
  modified_base (1531)..(1531): a, c, g or t
  modified_base (3178)..(3178): a, c, g or t
  modified_base (4009)..(4009): a, c, g or t
  modified_base (4600)..(4600): a, c, g or t
  modified_base (5092)..(5094): a, c, g or t
tgcgccgtcgaaccacactcatctggcattaagccgtcagtctttcgaaccgctgcgtattcagcgtctggggcaggagcagcattatctggggccgcttaacggaccggagctgctggtggtactaccggaagcgaaagcggtgggatcggtggcgatgtcgatgctgggaagcgatgctgatttaggcgtggtgctgttcaccagccgcgatgccagtcactatcaacaagggcagggaacgcagttacttcatgaaattgcgctgatgttgccggagcttctggagcgttggattgaacgcgtatgaccgatttacacaccgatgtagaacgctacctacgttatctgagcgtggagcggcagcttagtccgataactctgcttaactaccagcgacagcttgaggcgatcatcaattttgccagcgaaaacggcctgcaaaactggcagcaatgcgatgcagcgatggtgcgcaattttgctgtacgcagtcgccgtaaagggctgggcgcggcaagcctcgcattacgcctctctgcgctacgtagcttttttgactggctggtcagccagaacgaactcaaagctaacccggcgaaaggtgtttcggcaccgaaaacgccacgtcatctgccgaaaaatatcgacgtcgatgatataaatcgcctgttggatattgatatcaacgatcccctcgctgtgcgcgaccgtgcaatgctggaagtgatgtacggcgcgggcctgcgtctttccgagctggtggggctggacatcaaacacctcgacctggagtccggcgaagtgtgggtgatggggaaaggcagcaaagagcgccgcctgccgattggtcgtaacgctttgtcatggattgagcactggcttgatttgcgcgacctgtttggtagcgaagacgacgcgctttttctgtcgaaactgggcaagcgtatctccgcgcgtaatgtgcagaaacgctttgccgaatggggcataaaacaagggctgaataatcacgttcacccgcataaattacgtcactcgttcgctacgcatatgctggagtcgagcggcgatcttcgtggtgtgcaggagctgctgggtcatgccaacctctccaccacgcaaatctatactcatcttgattttcaacaccttgcctcggtgtacgatgcggcgcatccacgcgccaaacgggggaaataatgcgtttttaccggcctttggggcgcatctcggcgctcacctttgacctggatgataccctttacgataaccgtccggtgattttgcgcaccgagcaggaggcgcttacctttgtgcaaaattaccatccggcgctgcgcagcttccagaatgaagatctgcaacgcctgcgccaggcggtacgggaagcggaacccgagatttatcacgacgtgacgcgctggcgttttcgctcaatagaacaagcgatgcttgacgccggattgagcgcggaagaagccagtgcaggcgcacacgcggcaatgatcaactttgctaaatggcgcancaggatcgacgtcccgcagcaaacccacgacaccttaaaacagctggcgaagaaatggccgctggtggcgatcaccaacggtaacgctcagccggaactgtttggtttgggggattattttgagtttgtgctgcgcgctggcccgcacgggcgctcgaaaccgttcagcgatatgtacttcctggcggcggaaaaactcaacgtgccgatcggcgagatcttacatgtaggtgacgatctcaccactgacgtgggtggggcaattcgcagcggaatgcaggcctgttggatcagaccggaaaatggcgatctgatgcaaacctgggatagccgtttactcccgcatctggaaatttcccggttggcatctctgacctcgctgatataatcagcaaatctgtatatatacccagctttttggcggagggcgttgcgcttctccgcccaacctatttttacgcggcggtgccaatggacgtttcttacctgctcgacagccttaatgacaaacagcgcgaagcggtggccgcgccgcgcagcaaccttctggtgctggcgggcgcgggcagtggtaagacgcgcgtactggtgcatcgtatcgcctggctgatgagcgtggaaaactgctcgccatactcgattatggctgtgacgtttaccaacaaagcggcggcggagatgcgtcatcgtatcgggcaactgatgggcaccagccagggcggcatgtgggtcggcaccttccacgggctggcgcaccgtttgctgcgtgcgcaccatatggacgccaatctgccgcaggatttccagatcctcgatagcgaagaccagctacgcctgcttaagcgtctgatcaaagccatgaacctcgacgagaagcagtggccgccgcgccaggcaatgtggtacatcaacagccagaaagatgaaggcctgcgtccgcatcatattcaaagctacggtaatccggtggagcagacctggcagaaggtgtatcaggcgtatcaggaagcgtgcgatcgtgcaggcctggtggacttcgccgagctgctgctgcgcgctcacgagttgtggcttaacaagccgcatatcctgcaacactaccgcgaacgttttaccaacatcctggtggacgaattccaggataccaacaacattcagtacgcgtggatccgcctgctggcgggcgacaccggcaaagtgatgatcgtcggtgatgacgaccagtcaatctacggctggcgcggggcgcaggtggagaatattcagcgtttcctcaatgatttccccggtgccgaaactatccgtctggagcagaactatcgttctaccagtaacattctgagcgccgcgaacgccctgattgaaaacaacaacgggcgtctgggtaaaaaactgtggaccgatggcgcggacggtgagcctatttccctctattgcgcttttaacgaactcgatgaagcgcgttttgtcgttaaccgcatcaaaacctggcaggacaacggtggggcgctcgccgagtgcgccattctctaccgcagcaacgcccagtcgcgggtgctcgaagaggcgttattgcaggccagtatgccgtaccgtatttacggcgggatgcgcttcttcgaacgccaggaaatcaaagatgcgctntcgtatctgcgcctgattgccaaccgcaacgacgacgcggcctttgagcgtgtggtgaatacgccaacgcggggtattggtgaccggacgctggacgtggtacgtcagacatcgcgcgatcgccagttaacactctggcaggcatgtcgtgaactgttgcaggaaaaagccctcgccggacgtgctgccagcgccttacagcggtttatggaactgatcgacgccttagcgcaggaaactgccgatatgccgctgcatgtacagactgaccgggtaattaaagactccggcctgcgtaccatgtacgagcaggagaagggcgaaaaaggtcagacgcgtatcgaaaacttagaggaactagtgacggcaacgcgccaattcagctacaacgaagaagacgaagatttaatgccgctgcaggcgttcctctcccatgcggcgctggaagcgggcgaggggcaggcggatacctggcaggatgcagtgcagttgatgacgctgcactcggcgaaaggcctggagttcccgcaggtgtttatcgtcggtatggaagagggcatgttcccaagccagatgtcgctggatgaaggcggacgtctggaagaagaacgccgtctggcctacgttggtgtaacccgcgcgatgcagaaactgacgctgacctacgcggaaactcgccgtctgtatggcaaagaggtttaccatcgcccgtcgcgctttatcggtgagttgccggaagagtgtgtggaagaggtgcgcctgcgcgccacggtaagccgcccggtcagccatcagcgtatgggtacgccgatggtcgagaacgacagcggntacaagctcggccagcgtgtacgccacgctaagtttggtgaaggcactatcgtcaatatggaaggcagcggcgagcatagccgtttgcaggtggcattccagggccagggtattaaatggctggtggcggcatacgcccggctggagacggtataacgttgcgggatgcggtgcgccacaccgcatccggcatcagcaccttacttatcacatttcttcacatcaatattccagtcagcaccagacgcaacctgatgtttctgcgcgaaattatccatattcagcgccacggaaacattcaataagctgttcagatacaccatcggctgtccttccggcacatcgccgaagcttgcgacatacggcattttccctgcgtatttttgccgggaaccttcggaaatggtcacacacaacgtgtcgttgagtttgatccccgcctgattcagcaactcgtcgctgatattgctccagacgttgccgtactgaatatcgagaatcgggatattgcccttcacttcaccttttgttgcttttgctttctgataagaaagttcgacaacctttgcaggaagctcaggccccacctgntcgaacgtgatcgccccggaagccagacgtgcaccggtgtaggcatacacgtcacgaccgtggaaggtatatgacttttcagaacctttcaggcggttagctttttcgtcgatttcccggacgctctcaatacccagcgattccgccaccaaagtgagcgtaccgttatccggtgaaacgaagtattgaccgtttttggttttcagcactatcgatttacggtcagtgcctacgcccggatcgaccacactgacaaataccgaaccttgcggccagtaactggcggtctgatacaggcggtaagcgccttcccagatgttatacggtggaatttcgtgtgttaaatcaaatattttaagattatggtcaacaccgaatgcgacccctttcatcgccgagacggcaccatctttcaggctaaaatcagtttgtaaaatcaaagcgttatccgcataagcggatgatgatcccagacacgttaataaaaataannntgcgagcgtttttttcatttttgtttcccttcatttatctgatgattttccagctgtgtagccagccccagtttgtctggcctcctcgagtgtacaatgcttaacctttccgctcgacggaaatcatggtgacaaaaggatagcgttgccacgggattgccccgcctttcatatacatatgtgaaatcgtgccatcaagataaagcagctgctcaacgttcagtttcgctttggcataacaggcaaaatcataaaaatttgtcgcctgctggctcaacaaaaacacggcattcccatgtttattaattccaacaccgttacgaattttacgtgaggcgacgttgggatgaatacgcggattaattacactgttttccatcaacattggccctgactgcaccgcaaactgaatctctttactggttttgaaggcatccagacgaacgatgccgactttatctcccgcgacataaaacacgccgccaggacggataaagaaattcccttcacctgaagcgagatttaacgccaccttctgctgaccgttttcgatgtacaaaccgagcggcgcatagctttcatcatagatgccgccgttcatcgccatctgcacctgaccctgactattcatatccgccagcagagcatgtaaagttccccacgcttcgccattggctttttgccagtacattttcacccgctctgtttgaggattaacggtatacgcctgtacggtcagcgttggatctgagagtgcgcaatcatcagcggcaacagcaaacaagggaagtaaggtgagggcgagaaaaatccgtttgagattcaaggtgatcattcctttaccaatgagtagccgatgcgccattataggtcctggatgtgggatttttttatcctgttagcgaccttgacgagtaccaaaaagcgcgaagttcaactattgttctgtggtgttctgttgcgtgttgacggcaaa

SEQ ID NO: 1617 - DNA, 3823 bp, Escherichia coli
  Strain O55:H7
  modified_base (2026)..(2026): a, c, g or t
  modified_base (2739)..(2739): a, c, g or t
  modified_base (3475)..(3477): a, c, g or t
tggcgtaacatgcgcgcacgatcactctaagaggacattcgccttggacacacccagtagatactggctcactatcctgtcatccaggatcaactcctaaggctatccctttttgctgatagccttagcggttgtcagcgacctcaatttttcccgtcgcgctgagtcaggctgtttaatggtctgaaacccaatttgtttctgtgtgcccaccgaactgtccgatattttaagcattgggagtcccggtcatgctgagcgcatttcaactggaaaataaccgactgacccggctggaagtcgaagagtcacaaccccttgtaaatgcagtatggattgatcttgtcgaaccggacgacgacgagcgactgcgcgtacaatctgaacttggccagagcctggcaacccgcccggaactggaagacatcgaagcatcggcacgtttctttgaagacgatgacggcctgcatattcactccttcttcttctttgaagatgcggaagatcacgccggtaactccactgtggcatttaccatccgtgatggtcgtctgtttactctgcgtgagcgtgaactgcccgcttttcgtctgtatcgtatgcgtgcccgtagccagtcgatggtagacggtaacgcctacgagttgctgctggatctgttcgaaaccaaaatcgaacagttggcagatgaaattgaaaatatctatagcgacctggagcaattgagccgggtgattatggaagggcatcagggcgatgagtacgacgaggcgctctccactctggcggaactggaagatatcggctggaaagtgcgcctgtgtctgatggatacccagcgcgcgctcaacttcctggtacgtaaagcacgcttaccgggtgggcaactggagcaggcgcgtgaaatcctgcgagatatcgaatccctgctgccgcataacgaatccctgttccagaaggtgaacttcctgatgcaggcggcaatgggttttatcaacatcgagcagaaccgcatcatcaaaattttctcggtggtatccgtcgtgttcctgccgccaacgctggttgcttccagctacgggatgaactttgagtttatgccagaactgaagtggagtttcggctacccaggcgcgattatctttatgatcctcgcgggcctggcaccgtatctgtactttaagcggaagaactggttgtaatatgagtgccggataaagctatttttttatccggcttatttctaaaaattgtcttttttaaagtcatgcggattgaaaacttgctctattttattttcttgtgttaattgatactcagtaaaatcgttaataccaatatgagtgttacgataagggtattcattaataaccattaagtaatttttcgtgatgcaattatcattgctcttaattgtcgggaaacagtagagatcttcatacggcccttcgatatattttttatagtcagtgaagccattaccgatatcaatgacataccaggtatgccaactaccttctggtaggggatgttgatttttaatttcattctgatgcttcagataccaatttattttatcgctgtcagtccatggcagatgatcaacgaccagaaagactgaattgccagcatcagagtatgtatacaaaatctgtacaggacgcaatgtccataaattatagatgcagcatagaagaaataaacataatataattttttggagtttgcttttcatagataattttcgattctttcgatagtgttaaaattggtgaaaaaaggtttgaaagcaaagtctttatgccgttgtaaaaagaaccatatgcgaaaaaatctatatttgctgtaagtcttgtttttgatatcagttacatcaagaccgaagtggtcctgtgctacaaaatgaattgttgcactccatcctatagcgtatttttgaaaacttaaaagagatattttttgagctgaaatatcatgaacactgattcctaagccattaaaactgtcctcgaagtcattaaatttntttagtcttgatgaaagtaatttggttttaatgctttgcaggataagaggttggtatcctgtcgagggagttgaattaatgccattttcgatacattctttgattattcgtattggactattataaccatatttatttattttttcatgaaaagataaatttaattgttggctatgaaaattgctgccatttccatatctaaaatgttcaatcagatctttgataagtgttttatattgtccaaaaaaggaaaacatttttgctagttctttcatttctgcaaataaaatatcagtgcattcacgttgtgatatttttgttccggaacttgaggcactaaaagcaacattaatagaacctgggccagggaaatggtatttaataagtctgtaaggatcaacttttgctgagatatcgcttaggccgagtgagagaaaatcttgttctaccatatcaccatattgcatatcatcagcagaataattatcaaataaactaatagtttcgaaaagtgtacagggaatattaattgatggaagtaatgtgttattcatttacattttccttggttatatttaagctcaatatcaatttgagaacaaatgctagggtaaaaaaatatttaaaaaagaagtacacttcacattttttcattacatctctgaagagaacgtcgttaatgattggtcttgctcattgttaataacaaaatnttgaatttaccgattaggaaactttttcctacgccgattgcctccagctatggcatgaactttgagtttatgccagaactgaagtggagtttcggctacccaggcgcgattatctttatgatcctcgcgggcctggcaccgtatctgtactttaagcgcaagaactggctgtaactatacgatgtcgctgtgagtaagttagtgtgctgacagcgacattttagcagagggaatcgcagataacataattgttgtgaataatatccatgccacgttgagttggacgcttaatgactcacatctcaccccttcaattgctgcagagataatagaaaaaagtgtcaaacccaatgaaatcaatacaaagtagattgccttacatccagtatctcttattctttttgctccaatattgatatttacataggtattattaataaccagaataaaactcaaagccaggttgatatcattcaaagttattaatattgaccatgatgttaatgtatagattatgaactgaaagcgtgataaacgctcaagcttggatgggtagaatatatttctgatggatgatttgaacattttttacattgttttatatatataattgttttgaatatatattacctgaattatgtggtttgcatatatatatgcaatatagcagtctttgcattgataactatacagtagtaatttagagtgtgtaagtttttattgatggggtatattnnnattaaatataattggaatgtatttttattctataaacaatatcttgggtgaatggattctatatgggaaatggtaacttttggcagttgttcttgggtaaagaaccttacagcaaaaaatctgattttgttaaggcatggttattgtggtgggctattaccatccttgttctatttattttaagcctgactacgacattaaatttaagaagtataggtatagggttaagttttgggttttgtcaaatccttggtagatatacgatgtctctaggatggagtaagtactggggagttttgggggtatttcctgtaacaaatattgttctttttcttatcttaatttt

SEQ ID NO: 1618 - DNA, 22342 bp, Escherichia coli
  Strain O55:H7
  modified_base (1123)..(1123): a, c, g or t
  modified_base (2590)..(2591): a, c, g or t
  modified_base (5214)..(5214): a, c, g or t
  modified_base (9607)..(9607): a, c, g or t
  modified_base (9656)..(9656): a, c, g or t
  modified_base (9718)..(9718): a, c, g or t
  modified_base (11043)..(11043): a, c, g or t
  modified_base (14674)..(14675): a, c, g or t
  modified_base (14804)..(14804): a, c, g or t
  modified_base (18700)..(18700): a, c, g or t
  modified_base (19823)..(19823): a, c, g or t
  modified_base (20390)..(20390): a, c, g or t
  modified_base (21342)..(21344): a, c, g or t
aaaagataaataagtcagtgggtaggctctttaaacggcctacccatgttaattcttaactttttctacgctgcgtataaatcgcatccatcacaaaaattgccagcgccacccaaataaaggtgaaagtcaccatcttatcggcacccggtttttcaccataaaacgtcacagccagcaggaacatcagcgtcgggccaatgtactggaaaaagcctaacgttgagagacgaaggcgcgtggcagcggcggtaaaacacaacagcggtacggtagtgacaataccggcggcgatcagcagtaaattcagcgacatcgggttttgccccatatggctggttgagctgtcggcaatagcaaacaggtaaatcgccgccacgggcagcagccacatggtttcaattaacatgccggtttgtgcttctaccgcaatcttcttgcgcaccaggccgtagaaggcaaaactaaatgccagccccagcgcgataataggtagcgaaccaaaagtccacagctggactaacacgccacatatcgccagaatcaccgccagccattgcatccggcggaatcgctcgccgaggaaaatcatccccagcacaatgttcaccagcgggttaataaagtaaccaaggctcgcttccagcatatggtgattgttcaccgcccagataaacagtagccagttgccaccaatcagcacggcagagactgccagcataaaaattttctgtggcgtctgaatcagcgtttttaaataggaccactggcggcaaatgctcatcagcaccaccataaagaaaaacgaccagatcacgcgatgcgtcaggatctcatcggcgggcacgtagtaaatcaacttgaagtacgctggggctataccccaaataaaataagcggcaagagcgagtaatacgccctgccgcgtttgttttgcatccatcgggaatactcatttttaattggtaacagcagtttacctgcttttatgtcttcaacctaccatataggtggcggtggcactggcaatataaagctgttcttcattgtgtaattcaacgcgggcgacggcgactttattgcctgcacgcaacaggctactggtagcagtaaaacgctcgcntctgcctgggcgcagataatcgacgcgaagatcaatggtccccatccgcgatagccgctggcgtagttcatcttcactgatggttttgtggcgggttaaggtacttcctacgcacaccagaccggcggcgacatccagcgccgacgcaatgaccccgccgtgcaaaatgctttgcgcccagttgcccaccatcattggctgatttttaaaggccagctgtgcgaactctttttcgtaacgctccagttccatccccaatgcgcggttaaatggcatgtgataaacaaacatctcacccactaatttcagggcttgttcagcggtcagtacggcagacatatcatccttacacttcattggttaatgaaatgttgattttatgcttctttgttgttggtttctactttaggaagggataactaacggcaatggagttaagtatgtaaaataccccgcagaaaaacattcaccttatcaataattcgttacggagaacacgaccgatgcggactctgcagggctggttgttgccggtgtttatgttgcctatggcagtatatgcacaagaggcaacggtgaaagaggtgcatgacgcgccagcggtgcgtggcagtattatcgccaatatgctgcaggagcatgacaatccgttcacgctctatccttatgacaccaactacctcatctacacccaaaccagcgatctgaacaaagaagcgattgccagttacgactgggcggaaaatgcgcgtaaggatgaagtaaagtttcagttgagcctggcatttccgctgtggcgtgggattttaggcccgaactcggtgttgggtgcgtcttatacgcaaaaatcctggtggcaactgtccaatagcgaagagtcttcaccgtttcgtgaaaccaactacgaaccgcaattgttcctcggttttgccaccgattaccgttttgcaggttggacgctgcgcgatgtggagatggggtataaccacgactctaacgggcgttcagacccgacctcccgcagctggaaccgcctttatactcgcctgatggcagaaaacggtaactggctggtagaagtgaagccgtggtatgtggtgggtaatactgacgataacccggatatcaccaaatatatgggttactaccagcttaaaatcggctatcacctcggtgatgcggtgctcagtgcgaaaggacagtacaactggaacaccggctacggcggcgcggagttaggcttaagttacccgatcaccaaacatgtgcgcctttatactcaggtttacagcggctatggcgaatcgctcatcgactataacttcaaccagacccgtgtcggtgtgggggttatgctaaacgatttgttttgatgaacggttgagtggttggcaaatctggaatccagcatccaggattaccctctcagagactaaaagcattgcagtttctcgcgcaggcgctgannatagcgcctgtttttatttcaggcaatcggggtgaatgtggcgcaggcggaagtgttgaatctggagtccggagctaaacaggttttacaagaaacctttggctaccaacagtttcgccccggccaggaagaaattatcgacactgtgctttccggtcgcgattgcctggtcgtcatgcccaccggtggcggaaaatccctttgctatcaaattcctgccttattgctaaacggccttaccgtggttgtttcaccgctgatttcgttgatgaaagatcaggtggatcaactgcaagccaacggcgtggcggcggcgtgccttaactcgacgcaaacccgcgaacagcaacttgaagtgatgacaggctgccgcaccgggcaaattcgtctgctttatatcgccccggaacgcttgatgctggataactttcttgagcatctggcgcactggaatccggtgttattagccgttgatgaagcgcactgtatctcccaatggggccacgatttccgcccggaatatgccgcgctcggtcagttgcgccagcggttcccgacgctgccgtttatggcgctgaccgccacagccgacgacaccacgcgccaggatatcgtgcgcctgctggggctgaacgatccgctgattcaaatcagcagttttgaccgtccgaatattcgctacatgctgatggagaaattcaaaccgctcgatcagttgatgcgctacgtgcaggaacagcgcggtaagtccggcattatctactgcaacagccgggcgaaagtagaagacacagctgcgcgcctgcaaagcaagggtattagcgcggcggcctatcatgccgggctggaaaataatgtccgcgccgacgtgcaggagaaattccagcgcgatgacctgcaaattgtggtggcgacggtggcgttcggcatgggcatcaataaaccaaacgttcgcttcgtggtccactttgatattccgcgcaatatcgaatcctattatcaggaaaccggtcgcgccgggcgtgatggcctgcctgcggaagcgatgttgttttacgatccagctgatatggcgtggctgcgccgttgtctggaagagaagccgcaggggcagttgcaggatatcgagcgccacaaactcaatgcgatgggcgcgtttgccgaagcgcaaacttgccgtcgtctggtattgctgaactattttggcgaagggcgtcaggagccgtgcgggaactgcgatatctgcctcgatccgccgaaacagtacgacggttcaaccgatgctcagattgccctttccaccattggtcgtgtgaatcagcggtttgggatgggttatgtggtggaagtgattcgtggtgctaataaccagcgtatccgcgactatggtcatgacaaactgaaagtctatggcatgggccgtgataaaagccatgaacattgggtgagcgtgatccgccagctgattcacctcggcctggtgacgcaaaatattgcccagcattctgccctacaactgacagaggccgcgcgcccggtgctgcgcggcgaatcctctttacaacttgccgtgccgcgtatcgtggcgctcaaaccgaaagcgatgcagaaatcgttcggcggcaactatgatcgcaaactgttcgccaaattacgcaaactgcgtaaatcgattgccgatgaaagtaatgtcccgccgtacgtggtgtttaacgacgcaaccttgattgagatggctgaacagatgccgatcaccgccagcgaaatgctcagcgttaacggcgttgggatgcgcaagctggaacgctttggtaaaccgtttatggcgctgattcgtgcgcatgtcgatggcgacgacgaagagtagtcagcagcataaaaaagtgccaggatgaagactccgtaaacgtttcccccgcgagtcaaatgtatgttgatgttatttctcaccgtcgccatggtgcacattgtggcgcttatgagtcccggtcccgatttcttttttgtctctcagaccgctgtcagtcgttcccgtaaagaagcgatgatgggcgtgctgggtattacctgcggcgttatggtttgggcagggattgcgttgcttggcctgcatttgattatcgaaaaaatggcctggctgcatacgctgattatggttggcggtggcctgtatctctgctggatgggttaccagatgctgcgcggcgcgctgaaaaaagaggcggtttctgcacctgcgccacaggtcgagctggcgaaaagtgggcgcagtttcctgaaaggtttactgaccaatctcgctaatccgaaagcgattatctactttggctcggtgttctcattgtttgtcggtgataacgttggcactaccgcgcgctggggcattttcgcgttgattattgtcgaaacgctggcgtggtttactgtggtggccagcctgtttgccctgccgcaaatgcgccgtggttatcaacgtctggcgaagtggattgatggttttgccggggcgttatttgccggatttggcattcatttgattatttcgcggtaatgccagacgcgtcttcagagtaagtcggataaggcgtttacgccgcatccgacattatttttcacgcatgcntcgccgatgctaacagcgctcccaccagcataaacaacgagccgaaaatcttattcagcgccttcatctgctttggtcctttaatccatagagcaatccgttgagcaagggtggcgtaaccgatcatcacaataatatcgaccacaatagtggtgacaccgagcacgatatactgcatcagttgcggctgttgcggcatgatgaattgcggaaatagcgccgccagaaacacaatacttttgggattggtgagattcacaaaaactgcgcgctggaacaaatgtcgacgcgattgagtagaggccagcgatttaagatcaattgcgccagcggcgcgccattgctgtattcccagccaaatcaagtaagccgcgcctgcccacttcaacacttcaaacgcaatcactgagcgggaaaatagcgtccccaaccccacgccaaccagcacaatatgaatcgccagtccggtctgaagcccggcaatagacgccaccgcgccgcgataaccgtggttgagcgaggtggtcatagtgttgattgcaccagagcctggcgacaggcttaaaatgattgatgtcagtaggtaggcaaaccaccattctaaggtcatgatgaactcccggtgtgtctatttttgtgccacaatacgctactgtcgcagcgttgtgtcaggcacgctaaaaaaaacgattttacgtggtttaagaggcagattacccgatgtttcagcagcaaaaagactgggaaacaagagaaaacgcgtttgctgcttttaccatgggaccgctgactgatttctggcgtcagcgtgatgaagcagagtttactggtgtggatgacattccggtgcgctttgtccgttttcgcgcacagcaccatgaccgggtggtagtcatctgcccggggcgtattgagagctacgtaaaatatgcggaactggcctacgatttgttccatttggggtttgatgtcttaatcatcgaccatcgcgggcagggacgttccggtcgcctgttagccgatccgcatctcgggcatgttaatcgctttaatgattatgttgatgatctggcggcattctggcaacaggaggtccagcccggtccgtggcgtaaacgctatatactggcacattcgatgggcggtgcgatctccacattatttctgcaacgccatccaggtgtatgtgacgccattgcgctaactgcgccaatgtttgggatcgtgattcgtatgccgtcatttatggcacggcagatcctcaactgggccgaagcgcatccacgtttccgtgatggctatgcaataggcaccgggcgctggcgcgcgttgccgtttgctatcaacgtactgacccacagcagacagcgatatcgacgtaacttacgcttctatgctgatgacccaacgattcgcgtcggtgggccgacctaccattgggtacgcgaaagtattctggctggcgaacaggtgttagccggtgcgggtgatgacgccacgccaacgcttctcttgcaggctgaagaggaacgcgtggtggataaccgcattcatgaccgtttttgtgaactccgcaccgccgcgggccatcctgtcgaagggggacgaccgctggtaattaaaggtgcgtaccatgagatcctttttgaaaaggacgcaatgcgctcagttgcgctccacgccatcgttgattttttcaacaggcataactcacccagcggaaaccgctctacagaggtttaaatttcttatgtaccaggttgttgcgtctgatttagatggcacgttactttctcccgaccatacattatccccttacgccaaagaaaccctgaagctgctcaccgcgcgcggcatcaactttgtgtttgcgaccggtcgtcaccacgttgatgtggggcaaattcgcgataatctggagattaagtcttacatgattacctccaatggtgcgcgcgttcacgatctggatggtaatctgatttttgctcataacctggatcgcgacattgccagcgatctgtttggcgtagtcaacgacaatccggacatcattactaacgtttatcgcgacgacgaatggtttatgaatcgccatcgcccggaagagatgcgcttttttaaagaagcggtgttcaaatatgcgctgtatgagcctggattactggagccggaaggcgtcagcaaagtgttcttcacctgcgattcccatgaacaactgctgccgctggagcaggcgattaacgctcgttggggcgatcgcgtcaacgtcagtttctctaccttaacctgtctggaagtgatggcgggcggcgtttcaaaaggccatgcgctggaagcggtggcgaagaaactgggctacagcctgaaggattgtattgcgtttggtgacgggatgaacgatgccgaaatgctgtcgatggcggggaaaggctgcattatgggcagtgcgcaccagcgtctgaaagaccttcatcccgagctggaagtgattggtactaatgccgacgacgcggtgccgcattatctgcgtaaactctatttatcgtaatcgttctttatttggtcagttgtcaacctgatacttcgctacaatggatactcgttaatcaaagagttttccattgtggcgctacttatcatcaccacgattctgtgggccttctcctttagcttttatggcgagtaccttgcggggcacgtcgatagctattttgcggtgctggtgcgcgttggcctggcggcactcgtttttctgccgtttctgcgtacccgtggcaatagcctgaaaacagtcggcctgtatatgctggtgggcgcgatgcagctcggcgtgatgtatatgctgagtttccgcgcttatctctacctgacggtttccgaactgctgctgttcaccgtactgacgccgctctacatcacgctgatttatgacatcatgagtaagcgccgtctgcgctggggatatgcttttagtgccttgttggcggtgattggtgccgggattattcgctatgatcaggtcaccgaccatttctggactggcttgttgctggtgcaactctccaatatcacttttgccatcggcatggtgggttacaaacgcctgatggaaactcgcccgatgccgcagcataacgcctttgcgtggttctatcttggcgcgttcctggtggcggtaattgcatggttcttgctgggaaatgcgcagaaaatgccgcaaaccacgttgcaatggggcattctggtgtttcttggcgtggtggcttccgggattggctactttatgtggaactacggcgcaacccaagtagacgccggaacgctgggcattatgaataatatgcacgttccggcagggctgctggttaacctggctatctggcaccaacagccgcactggccaacgtttattacaggcgcgctggtgatcctggcctcactgtgggtgcatcgtaagtgggtcgctccgcgctcttcacaaacggcagatgatcgcaggcgtgattgcgcgctgagcgaataaacgcttccgtaactggctgacgctgctcgccatcgcgcacggcggcgtacagtcggctccacaagccttcgcccagggttttggtcaccaccagaccctggcgctcaaaactctctactacccaatgtggtagcgcggcaatacccatccgcgcggcaaccatctgaatcaacaataaggtgttatcgacgcttttcagcgacgggctaacgcctgcgggctggagaaaatgccgccagacatccagtcggctacgctgcaccggataaatcaacagcgtttcgctggcgagatcttccggcgtgattcgcgttttcgccgccagtggatggtcaggtgctaacaccagacgcacttcatagtcgaacatcggcgaataatgcaggccactacgcggcagaatatcggaggtcatcaccagatccagctcgccctgctgcaacgcaggctgcgggtcaaacgttacgcccgatttaaaatccatctccacctgcggccagttcttatggaaattttctaatgcgggcgtcagccactgaatacagctatggcactcaatggcaatgcgcaggcgcgtctgttgcggttcattgcaggcttgcagcgcctggctaatttgcggcagcacctggtttgccagttgcaacaggatttccccctgtggagtaaagcgtagcggctggctcttacgcacaaatagccggaagccaaggcgttgttccagatcgctaaactggtgagacagggcggattgcgtttgatgcaacgtcgccgcagcggctgcgagagagccgcagttccgcaacgcttgtagcgttttcaggtgttttacttcgatcatgaaagtccttcacttcggcatgaatnatttgcgcttgaggaatatacagtaaccgccaattatggatgtgtaaanatctggacggctaaaatccttcgtcttttaaatttatggtgcgttggctgcgtttctccacnccggtcacttacttcagtaagctcccggggatgaataaacttgccgccttccctaaattcaaaatccataggatttacatataattagaggaagaaaaatgacaatattgaatcacaccctcggtttccctcgcgttggcctgcgtcgcgagctgaaaaaagcgcaagagagttattgggcggggaactccacgcgtgaagaactgctggcggtagggcgtgaattgcgtgctcgtcactgggatcaacaaaagcaagcgggtatcgacctgctgccggtgggcgattttgcctggtacgatcatgtactgaccaccagtctgctgctgggtaacgttccggcgcgtcatcagaacaaagatggttcggtagatatcgacaccctgttccgtattggtcgtggacgtgcgccgactggcgaacctgcggcggcagcggaaatgaccaaatggtttaacaccaactatcactacatggtgccggagttcgttaaaggccaacagttcaaactgacctggacgcagctgctggacgaagtggacgaggcgctggcgctgggccacaaggtgaaacctgtgctgctggggccgattacctggctgtggctggggaaagtgaaaggtgaacagtttgaccgcctgagcctgctgaacgacattctgccggtttatcagcaagtgctggcagaactggcgaaacgcggcatcgagtgggtacagattgatgaacccgcgctggtactggaactaccacaggcgtggctggacgcatacaaacccgcttacgacgcgctccagggacaggtgaaactgctgctgaccacctattttgaaggcgtaacgccaaatctcgacacgattactgcgctgcctgttcaggggctgcatgtggaccttgtacatggtaaagatgacgttgttgaactgcacaagcgcctgccttctgactggctgctgtctgcgggtctgatcaatggtcgtaacgtctggcgcgccgatcttactgagaaatatgtgcaaattaaggacattgtcggcaaacgtgatttgtgggtggcatcttcctgctcgttgctgcacagccccatcgacctgagcgtggaaacgcgtcttgatgcagaagtgaaaagctggtttgccttcgccctacaaaaatgccatgaactggcactgctgcgcgatgcgctgaacagtggtgacacggcagctctggcagagtggagcgccccaattcaggcgcgtcgtcactctactcgtgtacataatccggcggtagaaaagcgtctggcggcgatcaccgcccaggacagccagcgtgcgaatgtntatgaagtgcgtgctgaagcccagcgtgcgcgttttaaactgccagcgtggccgaccaccacgattggttccttcccgcaaaccacggaaattcgtaccctgcgtctggatttcaaaaagggcaatctcgacgccaataactaccgcacgggcattgcggaacatatcaggcaggccattgttgaacaggaacgtttgggactggatgtgctggtacatggcgaggccgagcgtaatgacatggtggaatactttggcgagcacctcgacgggtttgtctttacgcaaaacggttgggtacagagctacggttcccgctgcgtgaagccaccgattgttattggtgacgttagtcgcccggcaccgattaccgtggagtgggcgaagtatgcgcaatctctgactgataaaccggtgaaagggatgctgactggcccggtgaccattctctgctggtcgttcccgcgtgaagatgtcagccgtgaaaccatcgccaaacaaattgcgctggcgctgcgtgatgaagtggcggacctggaagccgcaggaattggcatcatccagattgatgaaccggcgctgcgcgaaggtttaccgctgcgtcgtagcgactgggatgcatatctccagtggggcgtggaggccttccgtatcaacgccgccgtggcgaaagatgacacacaaatccacactcacatgtgttattgcgagttcaacgacatcatggattcgattgcggcactggacgcagacgtcatcaccatcgaaacctcgcgttctgacatggagttgctggagtcgttcgaagagtttgattatccgaatgaaatcggtccaggcgtctatgacattcactcgccaaacgtaccgagcgtggaatggattgaagccttgctgaagaaagcggcaaaacgcattccggcagagcgcctgtgggtcaacccggactgtggcctgaaaacgcgcggctggccagaaacccgcgcggcactggcgaacatggtgcaggcggcgcagaacttgcgtcgggggtaaaatccaaaccgggtggtaataccacccggtcttttctcattacagcgacttcttcccaccatactgcttaaaccattccagcatacgctgccagccatcttctgcagatgcggcatgatagctcgggcgataatcagcgttgaatgcatgcccggcgtccgggtacacgataatctctgctttcgcattagcagcccgcagcgcctggcgcatggtttcaacgctctcctgcggaatactgttatccagaccgccatataagccgagaaccggcgcgttaagatcggttgcgatatcaacaggttgtttcggtgaattcagcgacttatcgcccgtcagtttgccgtaccacgccactgcggcttttagctgtggattatgcgcggcatacagccaagtgatacgtccaccccagcagaatccggtgatcattaaacgatgaacatcgccgccgttgcgggaagcccaactggcgacatgatcgagatcggccagcacctgcgagtcaggcacttttgctaccagaccgctaagcaacgtggggatatcggcaaaatcattcggatcgccttcgcggaagtaaagttcaggtgcgatagccagatacccctccagcgccagacggcgacaaatgtcgcggatatgttcatgcacgccaaaaatttcctgcactacaatgaccactggcagtgggccatcgctttgctttggtctggcatggtaagcaggcatgttatccccttgtgaagggatagaggtgaagcccgccacaatcgcgtcgtccggggtctgaacgatggtcgaagcgagaggcgatgcagcaggtgcaaatccagattgttgtgttgttgccatggtattctccgtacccttataaaaatgttgcgcaatgttaactatagtcagcatgcaacaaatcacattgcctgaatcggctcatcttttatgcagtcctgcagaatgaagagtgatttatgtgatttgcatcacctttggtgggtaaatttatgcaacgcatttgcgtcatggtgatgagtatcacgaaaaaatgttaaacccttcggtaaagtgtctttttgcttcttctgactaaaccgattcacagaggagttgtatatgtccaagtctgatgtttttcatctcggcctcactaaaaacgatttacaaggggctacgcttgccatcgtccctggcgacccggatcgtgtggaaaagatcgccgcgctgatggataagccggttaagctggcatctcaccgcgaattcactacctggcgtgcagagctggatggtaaacctgttatcgtctgctctaccggtatcggcggcccgtctacctctattgctgttgaagagctggcacagctgggcattcgcaccttcctgcgtatcggtacaacgggcgctattcagccgcatattaatgtgggtgatgtcctggttaccacggcgtctgtccgtctggatggcgcgagcctgcacttcgcaccgctggaattcccggctgtcgctgatttcgaatgtacgactgcgctggttgaagctgcgaaatccattggcgcgacaactcacgttggcgtgacagcttcttctgataccttctacccaggtcaggaacgttacgatacttactctggtcgcgtagttcgtcactttaaaggttctatggaagagtggcaggcgatgggcgtaatgaactatgaaatggaatctgcaaccctgctgaccatgtgtgcaagtcagggcctgcgtgccggtatggtagcgggtgttatcgttaaccgcacccagcaagagatcccgaatgctgagacgatgaaacaaactgaaagccaagcggtgaaaatcgtggtggaagcggcgcgtcgtctgctgtaattctcttctcctgtctgaaggccgacgcgttcggccttttgtatttttgcgtagcgcctcgcaggaaatgcctttccaactggacgtttgtacagcacaattctattttgtgcgggtaagttgttgcgtcaggaggcgttgtggatttctcaatcatggtttacgcagttattgcgttggtgggtgtggcaattggctggctgtttgccagttatcaacatgcgcagcaaaaagccgagcaattagctgaacgtgaagagatggtcgcggagttaagcgcggcaaaacaacaaattacccaaagcgagcactggcgtgcagagtgcgagttactcaataacgaagtgcgcagcctgcaaagtattaacacctctctggaggccgatctgcgtgaagtaaccacgcggatggaagccgcacagcaacatgctgacgataaaattcgccagatgattaacagcgagcagcgcctcagtgagcagtttgaaaacctcgccaaccgtatttttgagcacagcaatcgccgggttgatgagcaaaaccgtcagagtctgaacagcctgttgtcgccgctacgtgaacaactggacggtttccgccgtcaggttcaggacagcttcggtaaagaagcacaagaacgccataccctgacccacgaaattcgcaatctccagcaactcaacgcgcaaatggcccaggaagcgatcaacctgacgcnngcgctgaaaggcgacaataaaacccagggcaactggggcgaggtagtattgacgcgggtgctggaggcttccggtctgcgtgaagggtatgaatatgaaacccaggtcagcatcgaaaatgacgcccgntcgcggatgcagccggatgtcatcgtgcggctgccgcagggaaaagatgtggtgatcgacgccaaaatgacgctggtcgcctatgaacgctattttaacgccgaagacgactacacccgcgaaagcgcgctacaggaacatatcgcgtcggtgcgtaaccatatccgtttgctgggacgcaaagattatcaacagctgccggggctgcgaactctggattacgtgctgatgtttattcccgttgaacccgcttttttactggcgcttgaccgccagccggagctgatcaccgaagcgttgaaaaacaatatcatgctggttagcccgactacgctgctggtggcgctgcgcactatcgccaacctgtggcgttatgagcatcaaagccgcaacgcccagcaaatcgccgatcgtgccagcaagctgtacgacaagatgcgtttgttcatcgatgacatgtccgcgattggtcaaagtctcgacaaagcgcaggataactatcggcaggcaatgaaaaaactctcttcagggcgcggaaatgtgctggcgcaggcagaagcgtttcgcggtttaggagtagaaattaaacgcgagattaatccggatttggctgaacaggcggtgagccaggatgaagagtatcgacttcggtcggttccggagcagccgaatgatgaagcttatcaacgcgatgatgaatataatcagcagtcgcgctagcccattgggagtagttaagccgggtagaaatctagggcatcgacgcccaatctgttacacttctggaacaattttttgatgagcaggcattgagatggtggataagtcacaagaaacgacgcactttggttttcagaccgtcgcgaaggaacaaaaagcggatatggtcgcccacgttttccattccgtggcatcaaaatacgatgtcatgaatgatttgatgtcatttggtattcatcgtttgtggaagcgattcacgattgattgcagcggcgtacgccgtgggcagaccgtgctggatctggctggtggcaccggcgacctgacagcgaaattctcccgcctggtcggagaaactggcaaagtggtccttgctgatatcaatgaatccatgctcaaaatgggccgcgagaagctgcgtaatatcggtgtgattggcaacgttgagtatgttcaggcgaacgctgaggcgctgccgttcccggataacacctttgattgcatcaccatttcgtttggtctgcgtaacgtcaccgacaaagataaagcactgcgttcaatgtatcgcgtgctgaaacccggcggccgcctgctggtgcttgagttctcgaagccaattatcgagccgctgagcaaagcctatgatgcatactccttccatgtgctgccgcgtattggctcactggtcgcgaacgacgccgacagctaccgttatctggcagaatccatccgtatgcatcccgatcaggataccctgaaagccatgatgcaggatgccggattcgaaagtgtcgactactacaatctgacggcaggggttgtggcgctgcatcgtggttataagttctgacaggagaccggaaatgccttttaaacctttagtgacggcaggaattgaaagtctgctcaacaccttcctgtatcgctcacccgcgctgaaaacggcccgctcgcgtctgttgggcaaagtgctgcgcgtggaggtaaaaggcttttcgacgtcattgattctggtgttcagcgaacgccaggttgatgtactgggcgaatgggcaggcgatgctgactgcaccgttatcgcctacgccagtgtgttgccgaaacttcgcgatcgccagcagcttgccgccctgattcgcagtggtgagctggaagtgcagggcgatattcaggtggtgcaaaacttcgttgcgctggcaggtctggcagagttcgaccctgcggaactgctggccccttataccggtgatatcgccgctgaaggaatcagcaaagccatgcgcggaggcgcaaagttcctgcatcacggcattaagcgccagcaacgttatgtggcggaagccattactgaagagtggcgtatggcacccggtccgcttgaagtggcctggtttgcggaagagacggctgccgtcgagcgtgctgttgatgccctgatcaaacggctggaaaaactggaggctaaatgacgccaggtgaagtacggcgcctatatttcatcattcgcacttttttaagctacggacttgatgaactgatccccaaaatgcgtatcaccctgccgctacggctatggcgatactcattattctggatgccaaatcggcataaagacaaacttttaggtgagcgactacgactggccctgcaagaactggggccggtatggatcaagttcgggcaaatgttatcaacccgccgcgatctttttccgccgcatattgccgatcagctggcgttattgcaggacaaagttgctccgtttgatggcaagctggcgaagcagcagattgaagctgcaatgggcggcttgccggtagaagcgtggtttgacgattttgaaatcaagccactggcttctgcttctatcgcccaggttcataccgcgcgattgaaatcgaatggtaaagaggtggtgattaaagtcatccgcccggatattttgccggtcattaaagcagacctgaaacttatctaccgtctggctcgctgggtgccgcgtttgctgccggatggtcgccgtctacgcccaaccgaagtggtgcgcgagtacgaaaagaccttgattgatgaactgaatttgctgcgggaatctgccaacgccattcagcttcggcgaaattttgaagacagcccgatgctctacatcccggaggtttaccctgactattgtagtgaagggatgatggtgatggagcgtatttacggcattccggtgtctgatgttgcggcgctggagaaaaacggcaccaacatgaaattgctggcggaacgcggcgtgcaggtgttcttcactcaggtctttcgcgacagctttttccatgccgatatgcaccctggcaacatcttcgtaagctatgaacacccggaaaacccgaaatatatcggcattgattgcgggattgttggctcgctaaacaaagaagataaacgctatctggcagaaaactttattgccttctttaatcgcgactatcgcaaagtggcagagctacacgtcgattctggctgggtgccaccagataccaacgttgaagagttcgaatttgctattcgtacggtctgtgaacctatctttgagaaaccgctggccgaaatttcgtttggacatgtactgttaaatctgtttaatacggcgcgtcgcttcaatatggaagtgcagccgcaactggtgttactccagaaaaccctgctctacgtcgaaggggtaggacgccagctttatccgcaactcgatttatggaaaacggcgaagcctttcctggagtcgtggattaaagatcaggtcggtattcctgcgctggtgagagcatttaaagaaaaagcgccgttctgggtcgaaaaaatgccagaactgcctgaattggtttacgacagtttgcgccagggcaagtatttacagcacagtgttgataagattgcccgcgagcttcagtcaaatcatgtacgtcagggacaatcgcgttattttctcggaattggcgctacgttagtattaagtggcacattcttgttggtcagccgacctgaatgggggctgatgcccggctggttaatggcaggtggtctgatcgcctggtttgtcggttggcgcaaaacacgctgattttttcatcgctcaaggcgggccgtgtaacgtataatgcggctttgtttaatcatcatctaccacagangaacatgtatgggtggtatcagtatttggcagttattgattattgccgtcatcgttgtactgctttttggcaccaaaaagctcggctccatcggttccgatcttggtgcgtcgatcaaaggctttaaaaaagcaatgagcgatgatgaaccaaagcaggataaaaccagtcaggatgctgattttactgcgaaaactatcgccgataagcaggcggatacgaatcaggaacaggctaaaacagaagacgcgaagcgccacgataaagagcaggtgtaatccgtgtttgatatcggttttagcgaactgctattggtgttcatcatcggcctcgtcgttctggggccgcaacgactgcctgtggcggtaaaaacggtagcgggctggattcgcgcgttgcgttcactggcgacaacggtgcagaacgaactgacccaggagttaaaactccaggagtttcaggacagtctgaaaaaggttgaaaaggcgagcctcactaacctgacgcccgaactgaaagcgtcgatggatgaactacgccaggccgcggagtcgatgaagcgttcctacgttgcaaacgatcctgaaaaggcgagcgatgaagcgcacaccatccataacccggtggtgaaagataatgaagctgcgcatgagggcgtaacgcctgccgctgcacaaacgcaggccagttcgccggaacagaagccagaaaccacgccagagccggtggtaaaacctgctgcggacgctgaaccgaaaaccgctgcaccttccccttcgtcgagtgataaaccgtaaacatgtctgtagaagatactcaaccgcttatcacgcatctgattgagctgcgtaagcgtctgctgaactgcattatcgcggtgatcgtgatattcctgtgtctggtctatttcgccaatgacatctatcacctggtatccgcgccattgatcaagcagttgccgcaaggttcaacgatgatcgccaccgacgtggcctcgccgttctttacgccgatcaagctgacctttatggtgtcgctgattctgtcagcgccggtgattctctatcaggtgtgggcatttatcgccccagcgctgtataagcatgaacgtcgcctggtggcnccgctgctggtttccagctctctgctattttatatcggcatggcgttcgcctactttgtggtctttccgctggcatttggcttccttgccaataccgcgccggaaggggtgcaggtatccaccgacatcgccagctatttaagcttcgttatggcgctgtttatggcgtttggtgtctcctttgaagtgccggtggcaattgtgctgctgtgctggatggggattacctcgccagaagacttacgcaaaaaacgcccgtatgtgctggttggtgcattcgttgtcgggatgttgctgacgccgccggatgtcttctcgcaaacgctgttggcgatcccgatgtactgtctgtttgaaatcggtgtcttcttctcacgcttttacgttggtaaagggcgaaatcgggaagaggaaaacgacgctgaagcagaaagcgaaaaaactgaagaataaattcaaccgcccgtcagggcggttgtcatatggagtacaggatgtttgatatcggcgttaatttgaccagttcgcaatttgcgaaagaccgtgatgatgttgtagcgcgcgctnttgacgcgggagttaatgggctactcatcaccggcactaacctgcgtgaaagccagcaggcgcaaaagctggcgcgtcagtattcgtcctgttggtcaacggcgggcgtacatcctcacgacagcagccagtggcaagctgcgactgaagaagcgattattgagctggccgcgcagccagaagtggtggcgattggtgaatgtggtctcgactttaaccgcaacttttcgacgccggaagagcaggaacgcgcttttgttgcccagctacgcattgccgcagatttaaacatgccggtatttatgcactgtcgcgatgcccacgagcggtttatgacattactggagccgtggctggataaactgcctggtgcggttcttcattgctttaccggcacacgcgaagagatgcaggcgtgcgtggcgcatggaatttatatcggcattaccggttgggtttgcgatgaacgacgcggactggagctgcgggaacttttgccgttgattccggcggaaaaattactgatcgaaactgatgcgccgtatctgctccctcgcgatctcacgccaaagccatcatcccggcgcaacgagccagcccatctgccccatattttgcaacgtattgcgcactggcgtggagaagatgccgcatggctggctgccaccacggatgctaatgtcaaaacactgtttgggattgcgttttagagtttgcggaactcggtgttcttcacactgtgcttaatctctttattaataagattaagcaatagcatggagcgagcctcaccatcgggttcggtgaaaatggcctgaaagccttcgaacgcgccttcggtaataatcaccttatcacccggataaggggttgccggatcgacaatgtctttcggtttatataccgatagctgatgaatcaccgccgatgggactatcgctggcgacgcgcnnnagcgcacgaagtggctgacaccgcgggtcgcgttgatagtcgtggtatgaatcacttctggatcaaattccacaaacaggtagttggggaacaatggctcactgactgcagtacgtttgccacgcacgattttttccagggtgatcatcggtgccaggcaattcacagcctgtctttcgaggtgttcctgggcacgttgaagttgcccgcgcttgcagtacagtaaataccaggattgcataatgactcttatccgtttaatcggggcgcaaggatagcaaaagctttacgctaagttaattatattccccggtttgcgttataccgtcagagttcacgctaatttaacaaatttacagcatcgcaaagatgaacgccgtataatgggcgcagattaagaggctacaatggacgccatgaaatataacgatttacgcgacttcttgacgttgcttgaacagcagggtgagctaaaacgtatcacgctcccggtggacccgcatctggaaatcactgaaattgctgaccgcacgctgcgtgctggtgggcctgcgctgttgtttgaaaaccctaaagggtactcaatgccggtgctgtgcaacttgttcggtacgccaaagcgcgtagcgatgggtatgggccaggaagatgtttcagcactgcgtgaagtcggtaaattattagcatttctgaaagaaccagagccgccaaaaggttttcgcgatctgtttgataagctgccgcagtttaagcaggtgttaaacatgccgacaaagcgactgcgcggtgcaccctgccaacaaaaaatcgtctctggcgatgacgtcgatctcaaccgtattcccattatgacctgttggccggaagatgccgcgccgctgattacatgggggctaaccgttacacgtggccctcataaagagcgacagaatctgggcatttatcgccagcaactgattggtaaaaacaagctgattatgcgttggctgtcgcatcgc

SEQ ID NO: 1619 - DNA, 9571 bp, Escherichia coli
  Strain O55:H7
  modified_base (775)..(775): a, c, g or t
  modified_base (1778)..(1778): a, c, g or t
  modified_base (2867)..(2870): a, c, g or t
  modified_base (3405)..(3405): a, c, g or t
  modified_base (5239)..(5239): a, c, g or t
  modified_base (5454)..(5454): a, c, g or t
  modified_base (9412)..(9415): a, c, g or t
  modified_base (9509)..(9509): a, c, g or t
  modified_base (9527)..(9527): a, c, g or t
  modified_base (9570)..(9570): a, c, g or t
cgcgctggattatcaggagtggtgtgcggcgcatccaggtgaacgtttcccgatctctgtggcgttgggcgctgatccggcaaccattctcggtgcagtcacaccagtaccagatactttgtcggaatacgcctttgccggattgctacgtggcaccaaaaccgaagtagtgaagtgtatttccaatgatctcgaagtgcccgccagtgcggagattgtgctggaagggtatatcgaacaaggcgaaatggcgccagaaggaccgtatggtgaccacactggttactataacgaagtcgatagtttcccggtatttaccgtgacgcatattacccagcgtgaagatgcgatttaccattccacctataccgggcgtccgccagatgaacccgcggtactgggagtggcgttgaacgaagtatttgttcccattctgcaaaagcagttcccggaaattgtcgatttttacctgccgccggaaggctgctcttatcgcctggcggtagtgacaatcaaaaaacagtacgccggacacgcgaagcgcgtcatgatgggcgtctggtcgttcttacgccagtttatgtacactaaatttgtgatcgtttgcgatgatgacgttaacgcacgcgactggaacgatgtgatttgggcgattaccacccgtatggacccagcgcgggatactgttctggtagaaaatacgcctattgattatctggattttgcctcgcctgtctccgggctgggttcaaaaatggggctggatgccacgaanaaatggccgggggaaacccagcgtgaatggggacgtcccatcaaaaaagatccagatgttgtcgcacatattgacgccatctgggatgaactggctatttttaacaacggtaaaagcgcctgatgcgcgtttgttttgccctatttatcgatccgacagagaaagcgcatgacaaccttaagctgtaaagtgacctcggtagaagctatcacggataccgtatatcgtgtccgcatcgtgccagacgcggccttttcttttcgtgctggtcagtatttgatggtagtgatggatgagcgcgacaaacgtccgttctcaatggcctcgacgccggatgaaaaagggtttatcgagctgcatattggcgcttctgaaatcaacctttacgcgaaagcagtcatggaccgcatcctcaaagatcatcaaatcgtggtcgatattccccacggagaagcgtggctgcgcgatgatgaagagcgtccgatgattttgattgcgggcggcaccgggttctcttatgcccgctcgattttgctgacagcgttggcgcgtaacccaaaccgtgatatcaccatttactggggcgggcgtgaagagcagcatctgtatgatctctgcgagcttgaggcgctttcgttgaagcatcctggtctgcaagtggtgccggtggttgaacaaccggaagcgggctggcgtgggcgtactggcaccgtgttaacggcggtattgcaggatcacggtacgctggcagagcatgatatctatattgccggacgttttgagatggcgaaaattgcccgtgacctgttttgcagtgagcgtaatgcgcgggaagatcgcctgtttggcgatgcgtttgcatttatctgagatataaaaaaacccgcccctgacaggcgggaagaacggcaactaaaactttattcagtggcatttagatctatgtcgcatccggcattcggcacacgatgcctgatgcgacgctggcgcgtcttatcaggcntacattggtgccggatcggtagaccggataaggcgttcacgccgcatccggcaagtggttaaacccgctcaaacaccgtcgcaataccctgacccagaccgatacacatcgtcgccagaccaaactgaacgtctttgtgttccatcagattcagcagcgtggtgctgatacgcgcaccggaacaacccagcggatgacccagcgcgatcgcgccaccgttgaggttgatcttctcgtcaatctgctcaattagtcccagatctttaatacatggcaggatctgcgcggcaaaggcttcattcatttcaaacacgccgatatcactgacagaaagccccgcttttttcagcgccagcttcgaggccggaaccgggccgtaacccatgatcgatgggtcacaaccaacgaccgccatcgaacgcacacgagcgcgcggcttaagacctaattcatgggcgcggctttcactcatcaccagcatggcagctgcgccatcggaaagtgcagaagatgtgcccgccgttaccgtaccgtttactggatcaaacgccggacgcagcgtggcgagggcttccacggtggtttccgggcgaatcacttcgtcgtaattaaactgcttcaggacgccgtcggcatcgtgaccaccagttgggatgatttcatttttaaatgcgcccgactgcgtggcggcccaggcgcgggcgtgtgaccgcgcggcaaaggcatcctgcatttcacggctgataccgtgcatacgcgccagcatttctgccgttaagcccatcatgcccgccgctttggcgacattgcggctcaggccagggtgaaaatcgacgccgtgactcatcggcacatggcccatatgctccacgccgccaaccagacatgcctgcgcatcgccggtcatgatcattcgtgctgcgtcatgcagtgcctgcatggatgaaccacacaagcgattgacagtaaccgccgggacagagtgcggcacttctgccagcagcgccgcgttacgggcgatattaaaaccctgctccagcgtctgctgcacacaaccccagtaaatatcgtcgagggccgccgcttccnnnnccgggttacgcgccagcaggctacgcattaaatgagcggagagatcttctgcacgcacgttacgaaaagcaccgcccttcgaacggcccatcggggtgcgaattgcatcgacaatgacaacctgttccattgtgactccttaagccgttttcaggtcgccaaccggacgggctggctcaaccgggggatagtacggttcgttatgacgcgctttattacgcagaccttccggcacttcgtacagcgggccgaggtgctgatattgctgtgccatatcgaggtattttgcgctgccgagggtgtccagccagcggaacgcgccgccgtggaacggagggaagcccaggccgtagaccagcgccatatccgcttctgccggagtggcgataatgccttcttccagacagcgcaccacttcgttgaccatcgggatcatcatgcgggcgataatctcttcttcgctgaaatcgcgcttcggctggctcacttctgccagcaggtcgtcaacagcggcgtcttcttctttcttcggctnacctttgctgtcttctttataatgccagaaaccgaggccgttcttctgaccaaagcggttggcatcaaacagcgcgtcgatggcatcgcgataatctttctgcatccgctgtgggaagcccgctgccatgactgcctgggcgtgatgcgcggtgtcaatgcccacaacgtccagcagatatgccggacccataggccagccaaactgtttttccatcactttgtcgatcttgcggaaatccgcgccgtcgcgcagcaactggctgaaaccggcgaaatacgggaacagcacgcggttgacgaagaagccggggcaatcgttaaccacaatcggcgttttacccatcttgctcgcccaggcgacgactttcgcaatagtttcgtcggagcttttctcgccgcgaataatttccaccaacggcattcggtggaccgggttaaagaagtgcatcccgcagaagttttccggacgttccagcgcgttggccagttcgctgataggaatggttgaagtgttagacgccagcacggtatccgggcgtactttctgctcggtttctgccagcacggcttttttcactttcgggttttcaacaatcgcttctaccacaacatccacgcgctcaaatccggcgtagtcgagcgttgggtggatcgtggagatcacgccagccagtttcagaccatcgatcttgccgcgctcaagctgcttgttcagtagtttcgcggcttcagtcatgccgagggctaacgacttgtcgttaatatctttcataatcaccggcacgcctttccacgcagactggtaagcgatgccgccacccataatgcctgcgcccagcacggcggcctgtttcggggtttcaacgtctttggtgagtttcttcgctttgccttttacatattgatcgttaaggaaaatgccgaccagtgcgcgagcttcgttggtatgcgccagcgggacaaagcttttgttttctaggtttaaggcttcttcacgaccaaaacgagccgcagcttcaatggtttttactgcggtgatgggggccgggtaatgttttcctgccgtttgtgcgaccatccctttagcgatggtgaagctcatggtggcttcaatcttgctcagttttagcggttccagcttcggctgacgtttcgctttccagtcgaggtcgccgttaatggcctggcgtaaaatcgccatcgccccttcaatcagtttttctgctttgactacgccatccaccagaccgattttcagcgcctgatccgcgccgacatctttaccggcggcaatgatttccagcgcactgtcagcgcccagcatacgtggcatacgtacagaaccgccaaagcccggcatgatgcccagtttggtttccggcagaccgatgcgcagatccggcgtcgccagacggtaatcggtcgccagcacgcattcgcagccaccgcccagcgcatagccattgacggcagcaatggtcggcaccggcagatcttccaggcgattaaacacgctattggcaaagtgcagccactgacttaactgttcttcaggaacgaggaacagggacaaaaattcggtgatatcagcaccgacgataaaggctgctttgttcgaacgcagcagcagcccttttagatctgattgctgttccagcacgccgatggcctcgccgaggctggcgacggtcgcagtgtcgagtttattaactgaacctggggcatcaaataccagttcggcaatgccatcttccagccagtcaaggtacagggtgtcgcctttgtaaagcatgtcagtctcctgaatccgcaaggtgatctggtcgtaccanatgcatcgaagtgtgtattttgtgttaaaaatatgcaaataaaagattaaagaaatgccgatctgatcacgctcggcagaaatcacgctctggatgaacgatgtgctaagatgcggagacttaaggtcaaaaaaacagaagggtaaaaaatggaatcactggcctcgctctataaaaatcatatagctacattgcaggaacgaactcgcgatgcnctgacgcgcttcaagctggatgcgttacttattcactccggcgaactgttcaacgtttttctcgacgatcatccctatccgtttaaagtgaacccgcaattcaaagcgtgggtgccggtaactcaggtgccaaactgctggctgctggtggatggcgtgaataagccgaaactgtggttctatctgccggttgattactggcacaacgtcgaaccgctgccgacctccttctggactgaagatgtagaagtgatcgcgctgccgaaagccgatggcattggtagtctgttgcctgctgcgcgcggcaatatcggttatatcggtccggtgccggaacgtgcgctgcaactgggtattgaggccagcaatatcaacccgaaaggggttatcgactacctgcattactaccgctccttcaaaaccgagtacgagctggcctgtatgcgtgaagcgcagaaaatggcggtcaacggtcatcgcgcggcagaagaagcgttccgttctggcatgagcgagttcgatatcaatattgcctatctgactgcgaccggtcatcgtgataccgacgtaccttacagcaacattgtggcactcaacgaacacgctgcggtgctgcattacaccaaactggatcatcaggcgccggaagagatgcgcagcttcctgctggatgccggggccgaatataacggctatgccgctgacctgacccgtacctggtcggcaaaaagtgacaacgattacgcacagctggtgaaagacgtaaatgatgaacaactggcgctgatcgcgaccatgaaagctggcgttagctatgtggattaccacatccagttccatcagcgcatcgccaaattgctgcgtaaacatcaaatcatcaccgatatgagtgaagaggcgatggtcgaaaacgatcttaccgggccgtttatgccgcatggtatcggccatccgctgggcctgcaggtgcatgacgtcgccggttttatgcaggatgatagcggtacgcacctcgcggcaccggcaaaatatccgtacctgcgctgcacccgtattctccagccgggcatggtgttaaccatcgaaccgggtatctacttcattgaatcgctgctggcaccgtggcgtgaagggcagttcagcaagcacttcaactggcagaaaattgaagcactgaaaccgttcggcggcattcgtatcgaagacaacgtggtgatccacgaaaataacgtggaaaacatgacccgggatctgaaactggcgtgatggaaagctggttaattcccgcggcaccggtcacggtcgttgaagagatcaaaaaaagccgcttcattacgctgttggcgcataccgatggcgttgaggcggcgaaagcgtttgttgaatcggtgcgggcagaacaccccgatgcccgccaccattgcgtggcgtgggtggcgggtgcgccggatgattctcaacagctgggtttctctgacgacggggagccggcgggaacggcaggtaaaccgatgctcgcccagctaatgggcagcggcgttggggaaattaccgctgtggtggtgcgctactacggcggcatattgcttggcaccggtgggttagtgaaagcgtatggcggcggcgtgaatcaggcgctgcgccagctaacgacccaacgcaagacgccattaaccgaatatactttgcaatgtgaatatagtcagttaaccggcattgaagcgttgctggggcagtgtgacggcaaaattatcaacagtgattatcaggcattcgttctgctgcgggtggcgcttccggcggcgaaagtggctgaattttccgcgaagctggcggattttagccgtggttcattgcaattgttagcgattgaagaataatccccacttcgttttgcagaactaaggaagcggcagagatgcattttcgcgccattacccgaatcgttggactactggtcatcttattttcagggaccatgattatccctgggctggtagcactcatctaccgggatggagcgggccgcgcttttacccagaccttttttgtcgccctcgccattggctctatgctgtggtggccgaaccgcaaagagaagggcgaactgaaatcccgtgaggggtttctgatagtggtgctgttctggaccgtgctgggtagtgtcggtgcgctcccttttatcttctcggaaagcccgaacctcacgattaccgatgcgttttttgaatctttctctggcctgaccaccaccggggccactacgctggtggggctggattcgctccctcatgccatcctcttttatcgccagatgctgcaatggtttggcgggatggggatcatcgtgttagcggttgcgatactgcctatcctcggcgtgggtgggatgcagctctatcgcgcagaaatgcccggcccgctgaaagataacaaaatgcgcccgcgaattgcggaaacggcgaaaaccctgtggttgatttatgtcttgctgaccgtcgcctgtgcgctggcgttgtggtttgccggaatggatgcctttgatgccatcggccatagctttgcgactatcgctattggcggcttctcgacacatgatgcaagtatcggttatttcgatagcccgactattaacactatcattgctatcttcctgctgatctccggctgtaactacggtctgcacttttcactgttaagtgggcgtagtctgaaggtttattggcgcgatccggaatttcgcatgtttatcggcgtacagtttacgctggtggttatttgtaccctcgtactgtggtttcataatgtctacagttcggcgctgatgacaattaaccaggcgtttttccaggtggtgtcgatggcgacaaccgccgggtttacgactgacagcattgcccgctggccgctctttttgccggtactgcttttatgttcagcttttatcggcggttgtgccgggtcaacgggcggtggcctgaaagtgatccgcatcctgctgctgtttaagcaggggaaccgtgaactgaaacgactggtgcatccgaacgccgtctatagcattaagctggggaatcgcgcactgccggaacgtatcctcgaagccgtttggggatttttctccgcctatgcattggtgtttattgtcagtatgctggcgattatcgccacgggcgtggatgacttttctgcctttgcctcggttgttgcgacattgaataacctggggccagggcttggcgtggttgctgataactttaccagtatgaacccggtggctaaatggatcctgattgccaacatgctgtttggtcgtctcgaggtctttacattgctggtgctctttaccccgactttctggcgtgaatgatggagtaatacgtgaaaacattaattcttttctcaacaagggacggacaaacgcgcgagattgcctcctacttggcttcggaactgaaagaactggggatccaggcggatgtcgccaatgtgcaccgcattgaagaaccacagtgggaaaactacgaccgtgtggtcattggtgcttctattcgctatggtcactaccactctgcgttccaggaatttgtcaaaaagcatgcgacgcggctgaattcgatgccgagcgcgttttactccgtaaacctggtggcgcgtaaaccggagaagcgcactccacagaccaacagctacgcgcggaagtttctgatgaactcgcaatggcgtcccgatcgctgcgcggtcattgccggggcgctgcgttacccacgttatcgctggtacgaccgttttatgatcaagctgattatgaagatgtcaggcggtgaaacggatacgcgcaaagaagttgtctataccgattgggagcaggtggcgaatttcgcccgagaaatcgcccatttaaccgacaaaccgacgctgaaataagcataaagaataaaaaatgcgcggtcagaannnnattttaaatttcctcttgtcaggccggaataactccctataatgcgccaccactgacacggaacaacggcaaacacgccgccgggtcagcgggnttctcctgagaattccgncagagaaagcaaaaataaatgcttgactctgtagcgggaaagng

SEQ ID NO: 1620 - DNA, 574 bp, Escherichia coli
  Strain O55:H7
  modified_base (290)..(290): a, c, g or t
  modified_base (484)..(484): a, c, g or t
ctgctctttaacaatttatcagacaatctgtgtgggcactcgaagatacggattcttaacgtcgcaagacgaaaaatgaataccaagtctcaagagtgaacacgtaattcattacgaagtttaattctttgagcatcaaacttttaaattgaagagtttgatcatggctcagattgaacgctggcggcaggcctaacacatgcaagtcgaacggtaacaggaagaagcttgcttctttgctgacgagtggcggacgggtgagtaatgtctgggaaactgcctgatggagngggataactactggaaacggtagctaataccgcataacgtcgcaagaccaaagagggggaccttcgggcctcttgccatcggatgtgcccagatgggattagctagtaggtggggtaacggctcacctaggcgacgatccctagctggtctgagaggatgaccagccacactggaactgagacacggtccagantcctacgggaggcagcagtggggaatattgcacaatgggcgcaagcctgatgcagccatgccgcgtgtatgaagaaggccttcgggttgt

SEQ ID NO: 1621 - DNA, 759 bp, Escherichia coli
  Strain O55:H7
  modified_base (2)..(3): a, c, g or t
  modified_base (304)..(304): a, c, g or t
cnntcagcggggaggaagggagtaaagttaatacctttgctcattgacgttacccgcagaagaagcaccggctaactccgtgccagcagccgcggtaatacggagggtgcaagcgttaatcggaattactgggcgtaaagcgcacgcaggcggtttgttaagtcagatgtgaaatccccgggctcaacctgggaactgcatctgatactggcaagcttgagtctcgtagaggggggtagaattccaggtgtagcggtgaaatgcgtagagatctggaggaataccggtggcgaaggcggccccntggacgaagactgacgctcaggtgcgaaagcgtggggagcaaacaggattagataccctggtagtccacgccgtaaacgatgtcgacttggaggttgtgcccttgaggcgtggcttccggagctaacgcgttaagtcgaccgcctggggagtacggccgcaaggttaaaactcaaatgaattgacgggggcccgcacaagcggtggagcatgtggtttaattcgatgcaacgcgaagaaccttacctggtcttgacatccacagaactttccagagatggattggtgccttcgggaactgtgagacaggtgctgcatggctgtcgtcagctcgtgttgtgaaatgttgggttaagtcccgcaacgagcgcaacccttatcctttgttgccagcggtccggccgggaactcaaaggagactgccagtgataaactggaggaaggtggggatgacgt

SEQ ID NO: 1622 - DNA, 488 bp, Escherichia coli
  Strain O55:H7
tcatggcccttacgaccagggctacacacgtgctacaatggcgcatacaaagagaagcgacctcgcgagagcaagcggacctcataaagtgcgtcgtagtccggattggagtctgcaactcgactccatgaagtcggaatcgctagtaatcgtggatcagaatgccacggtgaatacgttcccgggccttgtacacaccgcccgtcacaccatgggagtgggttgcaaaagaagtaggtagcttaaccttcgggagggcgcttaccactttgtgattcatgactggggtgaagtcgtaacaaggtaaccgtaggggaacctgcggttggatcacctccttaccttaaagaagcgtactttgcagtgctcacacagattgtctgatgaaaatgagcagtaaaacctctacaggcttgtagctcaggtggttagagcgcacccctgataagggtgaggtcggtggttcaagtccactcaggcctaccaaa

SEQ ID NO: 1623 - DNA, 245 bp, Escherichia coli
  Strain O55:H7
cggcaaatttgaagaggttttaactacatgttatggggctatagctcagctgggagagcgcctgctttgcacgcaggaggtctgcggttcgatcccgcatagctccaccatctctgtagtgattaaataaaaaatacttcagagtgtacctgcaaaggttcactgcgaagttttgctctttaaaaatctggatcaagctgaaaattgaaacactgaacaacgaaagttgttcgtgagtctctcaa

SEQ ID NO: 1624 - DNA, 329 bp, Escherichia coli
  Strain O55:H7
  modified_base (117)..(118): a, c, g or t
  modified_base (145)..(145): a, c, g or t
  modified_base (155)..(157): a, c, g or t
aaacatcttcgggttgtgaggttaagcgactaagcgtacacggtggatgccctggcagtcagaggcgatgaaggacgtgctaatctgcgataagcgtcggtaaggtgatatgaaccnntataaccggcgatttccgaatgggganacccagtgtnnntcgacacactatcattaactgaatccataggttaatgaggcgaaccgggggaactgaaacatctaagtaccccgaggaaaagaaatcaaccgagattcccccagtagcggcgagcgaacggggaggagcccagagcctgaatcagtgtgtgtgttagtggaagcgtctggaa

SEQ ID NO: 1625 - DNA, 184 bp, Escherichia coli
  Strain O55:H7
  modified_base (16)..(16): a, c, g or t
  modified_base (68)..(68): a, c, g or t
  modified_base (83)..(83): a, c, g or t
aaaaatgcacatgctntgagctcgatgagtagggcgggacacgtggtatcctgtctgaatatgggggnaccatcctccaaggntaaatactcctgactgaccgatagtgaaccagtaccgtgagggaaaggcgaaaagaaccccggcgaggggagtgaaaaagaacctgaaaccgtgtacgtac

SEQ ID NO: 1626 - DNA, 6348 bp, Escherichia coli
  Strain O55:H7
  modified_base (51)..(54): a, c, g or t
  modified_base (58)..(58): a, c, g or t
  modified_base (195)..(196): a, c, g or t
  modified_base (201)..(202): a, c, g or t
  modified_base (792)..(793): a, c, g or t
  modified_base (1101)..(1101): a, c, g or t
  modified_base (2003)..(2006): a, c, g or t
  modified_base (2079)..(2080): a, c, g or t
  modified_base (2084)..(2085): a, c, g or t
  modified_base (2092)..(2094): a, c, g or t
  modified_base (2233)..(2234): a, c, g or t
  modified_base (2240)..(2241): a, c, g or t
  modified_base (3551)..(3551): a, c, g or t
  modified_base (5843)..(5846): a, c, g or t
  modified_base (6126)..(6127): a, c, g or t
gactgcgtaccttttgtataatgggtcagcgacttatattctgtagcaagnnnnaccnaataggggagccgaagggaaaccgagtcttaactgggcgttaagttgcagggtatagacccgaaacccggtgatctagccatgggcaggttgaaggttgggtaacactaactggaggaccgaaccgactaatgttgnnaaatnngcggatgacttgtggctgggggtgaaaggccaatcaaaccgggagatagctggttctccccgaaagctatttaggtagcgcctcgtgaattcatctccgggggtagagcactgtttcggcaagggggtcatcccgacttaccaacccgatgcaaactgcgaataccggagaatgttatcacgggagacacacggcgggtgctaacgtccgtcgtgaagagggaaacaacccagaccgccagctaaggtcccaaagtcatggttaagtgggaaacgatgtgggaaggcccagacagccaggatgttggcttagaagcagccatcatttaaagaaagcgtaatagctcactggtcgagtcggcctgcgcggaagatgtaacggggctaaaccatgcaccgaagctgcggcagcgacactgtgtgttgttgggtaggggagcgttctgtaagcctgtgaaggtgtgctgtgaggcatgctggaggtatcagaagtgcgaatgctgacataagtaacgataaagcgggtgaaaagcccgctcgccggaagaccaagggttcctgtccaacgttaatcggggcagggtgagtcgnnccctaaggcgaggccgaaaggcgtagtcgatgggaaacaggttaatattcctgtacttggtgttactgcgaaggggggacggagaaggctatgttggccgggcgacggttgtcccggtttaagcgtgtaggctggttttccaggcaaatccggaaaatcaaggctgaggcgtgatgacgaggcactacggtgctgaagcaacaaatgccctgcttccaggaaaagcctctaagcatcaggtaacatcaaatcgtaccccaaaccgacacaggtggtcaggtagagaataccaaggcgcttgagagaantcgggtgaaggaactaggcaaaatggtgccgtaacttcgggagaaggcacgctgatatgtaggtgaagtccctcgcggatggagctgaaatcagtcgaagataccagctggctgcaactgtttattaaaaacacagcactgtgcaaacacgaaagtggacgtatacggtgtgacgcctgcccggtgccggaaggttaattgatggggtcagcgcaagcgaagctcttgatcgaagccccggtaaacggcggccgtaactataacggtcctaaggtagcgaaattccttgtcgggtaagttccgacctgcacgaatggcgtaatgatggccaggctgtctccacccgagactcagtgaaattgaactcgctgtgaagatgcagtgtacccgcggcaagacggaaagaccccgtgaacctttactatagcttgacactgaacattgagccttgatgtgtaggataggtgggaggctttgaagtgtggacgccagtctgcatggagccgaccttgaaataccaccctttaatgtttgatgttctaacgtggacccgtgatccgggttgcggacagtgtctggtgggtagtttgactggggcggtctcctcctaaagagtaacggaggagcacgaaggttggctaatcctggtcggacatcaggaggttagtgcaatggcataagccagcttgactgcgagcgtgacggcgcgagcaggtgcgaaagcaggtcatagtgatccggtggttctgaatggaagggccatcgctcaacggataaaaggtactccggggataacaggctgataccgcccaagagttcatatcgacggcggtgtttggcacctcgatgtcggctcatcacatcctggggctgaagtaggtcccaagggtatggctgttcgnnnnttaaagtggtacgcgagctgggtttagaacgtcgtgagacagttcggtccctatctgccgtgggcgctggagnntcanngggggcnnntctagtacgagaggaccsggagtggacgcatcactggtgttcgggttgtcatgccaatggcactgcccggtagctaaatgcggaagagataagtgctgaaagcatctaagcacgaaacttgccccgagatgagttctcnngacccnntaagggtcctgaaggaacgttgaagacgacgacgttgataggccgggtgtgtaagcgcagcgatgcgttgagctaaccggtactaatgaaccgtgaggcttaaccttacaacgccgaaggtgttttggcggatgagagaagattttcggcctgatacagattaaatcagaacgcagaagcggtctgataaaacagaatttgcctggcggccgtagcgcggtggtcccacctgaccccatgccgaactcagaagtgaaacgccgtagcgccgatggtagtgtggggtctccccatgcgagagtagggaactgccaggcatcaaattaagcgaaaggccatcctgacggatggcctttttgcgttggtgcaaaaaaatgccggatgcgacgctggcgcgtctgctccagcctactcttgcttatccgtcctgattttgcatccactccaccacaaaatcagccagcccctcaacatcattaatatccagtaacgcgacatcaagattaagcggcacatcactggctacagcaataacatgcctgtctatcactaattcttcaggtcgatgtccggctccatcgcgaaacagcacaatctttgcgatctcttcatgcttaaacccttcgaccagaatcaaatccagctttgaggtatccattcgacttgcgagaaactgtagatccagctcttcttcgtctggtgtttccgtcatcaaggcccatcgttgctggctggcaacgatggttgtgccgcgccagccttgcgcagctcatagctatctttgcctggcttatcaacatccatatcatggtgcgtatgcttaatcagccctggacggatccctctggcgcataatgccgggatcagttttttcaaaagcgtagtttttccggtaccactccacgcggcaaaggcgagtaacggtatcatcgtttttcctgccatcgggcaagctcctctggcgtattcacgttaacaaatgcatctttatgatcgctgaaatcaaccgcatgaccgccagccagacgcataaatgccattacccggcgttctcctgcttgcagatattctagtaataaaggctcaatagcgcggtttaccagagcaatagtcgggtgatcgcgttcaccgtcatggacccacacgacaggcgcatctttgcgctgatgattaagccgggcggctaaatcatggggaatgtaaggcgtatcgcacggacaaaacaaaaaccactcaccagcttcctgctgcattactgaaagcatccctgccagagggcctgggtaatccgccagtgaatcttcaatcantttcagaccgcctgcctgatagatttcctgatgacgattagcattaaccacgacgtgagagagctgcgtcataagcgcgtcagcgacatgttgccacagcggtttgccatttaagtccagcaatcctttatctacgccgcccattcgtctggctttaccgcctgccagcacaacgcctgttatcgtcgtcatcagattcaccgatatcgcctcttttattgtgggattgaccctgctaacgtgtctgtctcaagagtaaggagcattactatgaaatgtaaacgtctgaatgaagttattgaactcctccagccagcctggcaaaaagagccagaccttaacctgttgcaatttttgcagaaactggcgaaagagtcaggttttgacggcgaactggcggatttgacggatgacattctgatctatcacctgaaaatgcgtgattccgcgaaagatgcggtgatcccgggtttgcagaaagattatgaagaagacttcaaaacggcgctgttacgcgctcgcggcgtaattaaagagtaaaagcttgtaagcggcgccaccaaaatcatcgtgaaatgatatccttcatcattcgtaatgttttccggatgatgggatgaacaacagcgcttttactttccagacactacacccggataccatcatggacgctctgtttgagcaagggatccgggtggattccggtcttaccccgcttaacagctatgaaaaccgtgtctatcaatttcaggacgaagatcgtcgacgttttgtcgtcaaattttatcgtcctgaacgttggacagccgatcaaatcctcgaagaacatcaatttgcgttgcagctggtaaatgatgaagttccggttgcagcacctgtggcttttaacggtcagactttattgaatcatcagggattttatttcgctgtttttccaagcgtcggtggtcgccagttcgaagctgataatatcgatcagatggaagcggttgggcgttatttagggcgtatgcaccagacggggcgcaaacagctttttatccatcgcccgaccatcggtctgaatgaatatctcattgagccacgcaagctgtttgaggacgctacactgataccttccgggttgaaagcggcattcctgaaagcgacagatgagctgatcgccgccgttacagcacactggcgggaagatttcaccgttctgcggctacatggagactgccacgccgggaatattctctggcgcgatggtccaatgtttgttgatctggatgatgcacgtaatggtccagctattcaggatttgtggatgttgctcaatggcgataaagccgagcagcggatgcaactggaaactattattgaagcttatgaagaatttagcgagttcgacaccgctgaaatcggactgattgaacctttacgcgccatgcgtttggtttattatcttgcctggctaatgcggcgttgggctgatcccgcgttcccgaaaaatttcccgtggttaaccggggaagattactggctacgacagacggcgacttttatagaacaggcaaaagttctacaagaaccccctttgcaattaacacctatgtattaatcggagagagtagatcatgaaaaagatttggctggcgctggctggtttagttttagcgtttagcgcatcggcggcgcagtatgaagatggtaaacagtacactaccctggaaaaaccggtagctggcgcgccgcaagtgctggagtttttctctttcttctgcccgcactgctatcagtttgaagaagttctgcatatttctgataatgtgaagaaaaaactgccggaaggcgtgaagatgactaaataccacgtcaacttcatgggtggtgacctgggcaaagatctgactcaggcatgggctgtggcgatggcgctgggcgtggaagacaaagtgactgttccgctgtttgaaggcgtacagaaaacccagaccattcgttcagcatctgatatccgcgatgtatttatcaacgcaggtattaaaggtgaagagtacgacgcggcgtggaacagcttcgtggtgaaatctctggtcgctcagcaggaaaaagctgcagctgacgtgcaattgcgtggtgttccggcgatgtttgttaacggtaaatatcagctgaatccgcagggtatggataccagcaatatggatgtttttgttcagcagtatgctgatacagtgaaatatctgtccgagaaaaaataattcaatgtaaattacataaagcccgtgaatattcacgggctttttnnnntatttaataaatataaatacattctgataatgcatcctgccgctggacattatttcagcataagtggatattcaaagttttgctgttttatcagggaatatttatatgatacgtaagtcagctacaggtgttattgttgcgttagccgtaatctggggtggtggcacatggtacacaggtacgcaaattcagcctggtgtcgaaaaatttattaaagattttaacgatgctaaaaagaaaggtgaacatgcctacgatatgacgttaagttatcaaaatnntgacaaaggcttttttaattcccgttttcaaatgcaaatgacattcgataacggtgcacccgatctcaatatcaagccaggccagaaagttgtatttgatgtggatgttgagcacggtccgttgcccatcacaatgttaatgcatggtaatgtcatcccagcactggcagcggcaaaagtgaacttagtgaataatgaactgacacaaccgctatttatcg

SEQ ID NO: 1627 - DNA, 7344 bp, Escherichia coli
  Strain O55:H7
  modified_base (2761)..(2761): a, c, g or t
  modified_base (4825)..(4825): a, c, g or t
  modified_base (7175)..(7175): a, c, g or t
  modified_base (7329)..(7329): a, c, g or t
ataaatcgcccgtggaagcgacattgcgattcgcgtttggtggctcattctctacgacattagatgttgcccctgcagagtatggaaagttttcttttggtgagggccagtttacttttaatggtgatagtagttcattgtctaacctggatattgaaggcaaagtcgaagatattgttctgcaattatcaccaatgaacaaagtaacggcaaaaagttttaccattgattctctggcgcgattagaagaaaagaaatttccggttggtgaaagcgagtcgaaatttaatcagattaacattatcaatcacggggaagacgttgcccaaatcgatgctttcgttgcaaaaaccaggctggatcgcgttaaagacaaagattatatcaatgtcaatctgacctacgaacttgataagttaacaaaagggaatcagcaactcggtagtggtgagtggtcattgattgctgaatctattgatccctcagcggtgcgccaatttatcatccagtataacattgcgatgcagaagcagcttgctgcacaccctgaattagcaaacgatgaagttgctctgcaagaagtgaatgctgcattgttcaaagagtatttaccgttattacaacaaagtgagccgaccattaaacaaccggtaagatggaagaacgcactcggcgaactaaatgccaatctggatatcagtattgccgacccagccaaatcttcatcatccacaaacaaagatatcaaatcgctcaattttgatgtgaagttaccgcttaatgtcgtcacagaaaccgcaaaacagcttaatttatctgaaggaatggatgcggaaaaagcgcaaaagcaggctgataaacaaatcagcgggatgatgacattaggtcagatgtttcagttaatcacgattgacaacaataccgcctcgctgcagctgcgttatacaccgggtaaagttgtttttaacggacaggagatgagcgaagaagaatttatgtctcgtgccggacgttttgttcattaaaatactcactcgcctctgctcattcagaggcgagcaaaatttacttgtcctgccgctgtgatgacatcaacgacgtcagaagtcggtctttttcctgccacaatgagttcagccattgctgaaaatggcgcttaaagcttttgtcattgatgtagtcgccatgtaactcatcggcaataggctgtaaatccacatgtacgacaatccgcgtcagtttaccgcttaacatatcgaagaacggctgacggttattgtccggataacacaacgtaacattaagcagtttatcgaattgtttacccagtacatttagcgccatcgcaatgcctgccgcctttggtggcaacaagttttggaaagtggagtgggtttgctgatgtttttcttgcgtgaaacgggagccttcaacgaaattgacaatggtggtgggatgcaggcgaaacttttcacaagaacgccgagtggtttcaacatctttaccacgtcgctccggatgacgtaataaataagcgcgggaataacgcttcataaacggcatatccagcgcccagcacgccaggccaagaaatggcacccaggccagctgttgcttgaggaaatatttattcatcggaatgtgcttacgaaacagcacgcacagtacgacaatatctgcccaactacggtggttacaaataagcagataccagttcttcttacttaacccttccagcccgtgaacttcccattgcaggtgtgggttcagatgcagtaataccgccagaccttcacaccagcaatacatcataaaatcacaaaaacgcgaaacctttcgccaaatgactggcacaggtagcaatagttttacaatcccggcaatgatgatcgggacggaacaaaaaatagtgaccaaaatggtcaatacgatactcagcaaaagggttatcgcagcgagtattctcgtcataatgaatttattcaaaaggttagccatagacagtgcgctaaagaagcgcaaggcgcagattttagcagaaaacgacccaaataacggatgatccttaaggagaaaaataattcatatctatccacattagaaaaaatcccattatctcaattattagggatggatttatttttaactgcatgaaaaacaaagacaaacatcatgctgtaaaaagcatgataataaattaaaagcgatgtaaataatttatgcacaaagttatccacatgacgatttgcgagcgatccagaagatctacaaaagattttcacgaaaagcggtgaaaaactcatgtttttatcctgtctgtggcatcctttacccataatctgataaacaggcacggacattatggttcagatcccccaaaatccacttatccttgtagatggttcatcttatctttatcgcgcatatcacgcgtttcccccgctgactaacagcgcaggcgagccgaccggtgcgatgtatggtgtcctcaacatgctgcgcagtctgatcatgcaatataaaccgacgcatgcagcggtggtctttgacgccaagggaaaaacctttcgtgatgaactgtttgaacattacaaatcacatcgcccgccaatgccggacgatctgcgagcacaaatcgaacccttgcacgcgatggttaaagcgatgggactgccgctgctggcggtttctggcgtagaagcggacgacgttatcggtactctggcgcgcgaagccgaaaaagccgggcgtccggtgctgntcagcactggcgataaagatatggcgcagctggtgacgccaaatattacgcttatcaacaccatgacgaataccatcctcggaccggaagaggtggtgaataagtacggcgtgccgccagaactgatcatcgatttcctggcgctgatgggtgactcctctgataacattcctggcgtaccgggcgtcggtgaaaaaaccgcgcaggcattgctgcaaggtcttggcgggctggatacgctgtatgccgagccagaaaaaattgctgggttgagcttccgtggcgcgaaaacaatggcagcgaagctcgagcaaaacaaagaagttgcttatctctcataccagctggcgacgattaaaaccgacgttgaactggagctgacctgtgaacaactggaagtgcagcaaccggcagcggaagagttgttggggctgttcaaaaagtatgagttcaaacgctggactgctgatgtcgaagcgggcaaatggttacaggccaaaggggcaaaaccagccgcgaagccacaggaaaccagtgttgcagacgaagcaccagaagtgacggcaacggtgatttcttatgacaactacgtcaccatccttgatgaagaaacactgaaagcgtggattgcgaagctggaaaaagcgccggtatttgcatttgataccgaaaccgacagccttgataacatctctgctaacctggtcgggctttcttttgctatcgagccaggcgtagcggcatatattccggttgctcatgattatcttgatgcgcccgatcaaatctctcgcgagcgtgcactcgagttgctaaaaccgctgctggaagatgaaaaggcgctgaaggtcgggcaaaacctgaaatacgatcgcggtattctggcgaattacggcattgagctgcgtgggattgcgtttgataccatgctggagtcctacattctcaatagcgttgccgggcgtcacgatatggacagcctcgcggaacgttggttgaagcacaaaaccatcacttttgaagagattgcgggtaaaggcaaaaatcaactgacttttaaccagattgccctcgaagaggccggacgttacgccgccgaagatgctgatgtcaccttgcagttgcatctgaaaatgtggccggatctgcaaaaacacaaagggccgttgaacgtcttcgagaatatcgaaatgccgctggtgccagtactttcacgcattgaacgtaacggtgtgaagatcgatccgaaagtgctgcacaatcattctgaagagctcacccttcgtctggctgagctggaaaagaaagcgcatgaaattgcaggtgaggaatttaacctttcttccaccaagcagttacaaaccattctgtttgaaaaacagggcattaaaccgctgaagaaaacgccgggtggcgcgccgtcaacgtcggaagaggtactggaagaactggcgctggactatccgttgccaaaagtgattctggagtatcgtggtctggcgaagctgaaatcgacttacaccgacaagctgccgctgatgatcaacccgaaaaccgggcgtgtgcatacctcttatcaccaggctgtaactgcaacgggacgtttatcgtcaaccgatcctaacctgcaaaacattccggtgcgtaacgaagaaggtcgtcgtatccgccaggcgtttattgcgccagaggattatgtgattgtctcagcggactactcgcagattgaactgcgcattatggcgcatctctcgcgtgacaaaggcttgctgaccgcattcgcggaaggaaaagatatccaccgggcaacggcggcagaagtgtttggtttgccactggaaaccgtcaccagcgagcaacgccgtagcgcgaaagcgatcaactttggtctgatttatggcatgagtgctttcggtctggcgcggcaattgaacattccacgtaaagaagcgcagaagtacatggacctttacttcgaacgctaccctggcgtgctggagtatatggaacgcacccgtgctcaggcgaaagagcagggctacgttgaaacgctggacggacgcngtctgtatctgccggatatcaaatccagcaatggtgctcgtcgtgcagcggctgaacgtgcagccattaacgcgccaatgcagggaaccgccgccgacattatcaaacgggcgatgattgccgttgatgcgtggttacaggctgagcaaccgcgtgtacgtatgatcatgcaggtacacgatgaactggtatttgaagttcatagagatgatgtcgatgccgttgcgaagcagattcatcaactgatggaaaactgtacccgtctggatgtgccgttgctggtggaagtggggagtggcgaaaactgggatcaggcgcactaagattcgcctgaacatgcccttttttcgtaagtaagcaacataagctgtcacgttttgtgatggctattagaaattcctatgcaacaactgaaaaaaaattacaaaaagtgctttctgaactgaacaaaaaagagtaaagttagtcgcgtagggtacagaggtaagatgttctatctttcagaccttttacttcacgtaatcggatttggctgaatattttagccgccccagtcagtaatgactggggcgttttttattgggcgaaaggaaagatccgtaatgcctgatgcaccatgtttatcaggccaacggtagaattgtaatctattgaatttatgggccggatacgccacatccggcataagcattaaggtaagaaaattattcgccgtcctgcgtttcttctacaggctgcatctcgttaaaccaggtatccagtttctgccgcagcttgtccacgccttgtttcttcagcgaagaaaacgtttcaacctgcacatcaccgttaaacgccagcaccgcttcacgcaccatattcaattgcgctttacgtgcgccgcttgccagtttgtccgctttggtcagcagtaccagcacggcgatattgctgtctaccgcccactcaatcatctgctgatccaaatctttcagcggatggcgaatatccattagcactaccagaccttgtaggctctgacgtttttcgaggtactcgccgagcgcgcgctgccatttgcgcttcatctcttccgggacttccgcataaccgtacccaggcaagtcaaccagacgcttgccgtcagccacttcaaacaggttgataagctgggtgcgtccaggggtttttgaggtacgagccaggcttttctggttagtcagcgtgttcagcgcgctggatttacctgcgttggaacggcctgcaaaagccacttcaattccggtatcggaaggtaggtggcgaatatcaggcgcactcatcacaaaatgcgtctgttgataattcaaattagtcaaagcggtcgtctccgtcagtcaaagctttgcggcgattatacctgaaccataataaaaggcggatttttcggcgtgagcgttgtaagtaaaagccatacgctttgtgagacattgccgatagtctttatgcgaaatagcagagaaaattctgcgatgcatgtcaaataagctatataaatcagttaattgcttttatataaaactctgaaaatgtgcaaatactgatggcggttgattgtttgtttaaagcaaaggcgtaaagtagcacccatagagcgaggacgctaacaggaacaatgactcaggatgagggtcaggagcgccaggaggcgaagacagaggattgtcaggaagacaaacgtccggagacgtaattaaacggaaatggaatcaacacggattgttccggctaatggaaaaacagggtgtgttggcggcctgcaaggattgtaagacccgttaagggttatgagtcaggaaaaaaggcgacagagtaatctgtcgccttttttctttgcttgctttctgttagattccgccgcaaatctatactgaataaaacggctaaaagacgaaccattatgaaaccatcttcaccatcacgcagcaaaggtcatgcaaaagcgcgtcgcaaaacgcgcgaagagctgaatcaggaagctcgtgaccgcaagcgtcagaaaaaacgtcgtggtcatgcgccgggcagccgcgcagcgggcggaaacaacacgtcaggcagcaaaggccagaacgcaccgaaagatccacgtattggcagtaaaacccctattccattgggcgtgactgaaaaagtcaccaaacagcacaaaccgaagagtgagaaacctatgctttcaccgcaggcggagttggaattactggaaacggatgagcgtctggatgcgctgctggaacgtctggaagcaggcgaaaccctgagtgccgaagagcaatcctgggtggatgctaaactggatcgtattgatgagttgatgcagaaactcggcctntcttatgacgatgacgaagaagaggaagaagacgagaagcaagaagacatgatgcgtctgctgcggggcaactaacggattgccgccgtgggccttcccgttctgctgataacccttccggttatatgttatctggtgtggttattcgttaaantacagcggttgtcgc

SEQ ID NO: 1628 - DNA, 2313 bp, Escherichia coli
  Strain O55:H7
  modified_base (1349)..(1349): a, c, g or t
caaaagtggctgcgcaaccggctgatgacccgaaacgggcatccgccggtacgccgtagccgccagagacgccatcggaaggagtgagcatgtctgtacagcaaatcgactgggatctggccctgatccagaaatataactattccgggccacgatacacctcgtacccgaccgcgctggagttttcagaagacttcggcgaacaggcgtttttacaagccgtggcgcgctatcctgagcgtccattatctctctacgtacatatcccgttctgccataagctttgttacttctgcggctgcaataagattgttactcgccagcagcacaaggccgatcagtatctggacgcgctggagcaagaaatcgtccatcgtgcaccgctgttcgccgggcgtcacgtcagccagctgcactggggcggcggaacgccgacgtatcttaataaagcgcaaatcagccgcctgatgaagctgctgcgcgaaaacttccagttcaatgccgatgcggagatttcgatcgaagtcgatccgcgggaaatcgaactggatgtactcgatcatttacgcgccgagggctttaatcgcctgagtatgggcgtgcaggacttcaacaaagaagtgcaacgtctggttaaccgcgagcaggatgaagagtttatctttgcgctgcttaaccatgcgcgtgagattggctttacctccaccaacatcgacctgatttacggcctgccgaaacagacgccggaaagtttcgcctttaccctgaaacgcgtggcggagctaaaccctgaccgtctgagcgtctttaactatgcgcatctgccgaccatttttgctgctcagcgcaaaatcaaagatgctgacctgccgagtccgcagcaaaaactcgatatcctgcaggaaaccatcgccttcctgacgcaatcgggctatcagtttatcggtatggatcactttgcccgtccggatgacgagctggcggtggcccagcgtgaaggcgtgctgcatcgtaatttccagggctacaccactcagggcgataccgatctgctggggatgggcgtttccgccatcagcatgattggcgactgctacgcgcagaaccagaaagagttgaagcagtactatcagcaagtggatgaacaaggcaatgcgctgtggcgtggtattgcgctaacgcgtgatgactgtattcgccgcgatgtgattaagtcgctcatctgcaacttccgtctggattacgcccctattgagaaacagtgggatttgcacttcgctgattactttgcggaagatctcaagctgctcgccccgttagcaaaagatgggctggtggatgtggatganaagggaatacaggtaacggcgaaaggtcgcttgctgatccgcaacatttgcatgtgctttgatacctatctgcgccagaaagcgcggatgcagcagttctctcgggtgatttaaatagtgaatggcgcttcgtttacaaagtagaaaacgaaagcgccatcaatgtgctgagaacaagattgcctgatgcgctacgcttatcaggcctacaaaacctgttgaaaatattgcttttgtaggccggataaggcgttcacgcagcatctggcatgaacaaagagcacttcatcagcaatctgaaactcaactaaacagcccaatcatcgcggcacacagcacggcagcaacagcagtttgcggtgtgtggctgtcaactgcgccactcgataccagattaattattgattccagcataatgactctccccgttttccgggcaagatcatactgaacttatcggaacagtaaagcgcaaaataccagcaatttgcgctcaataatcaatctttacacacaagccgtgaatcactccatccccagctcttttaacttacgcgtcagggtgttgcggccccagccgagtagccgcgccgcctcctgtttatgcccctgcgtatgtcgcaacgcggtcgtcagtaacgtccgctccagctctggctgcgcttcggaaagcagattttgatgaccggaacgtagcgctctgtctgcccactgcgcaagaagcgtcgcccaactgtccggttgcatttgcgaagtactctccgcaaccgttgattcaaacagttcgccaggcaaatcctgaatcaacacttcctgtccggcagccattaccgttagccagcggcaggtgttttccagctggcgcacgttgcctggccacgccagacgcgtcaacgcggcttcggtttccggatgcagcaacttcgcttctacgcccagttctcgcgcggcaacctgtaaaaaa

SEQ ID NO: 1629 - DNA, 2872 bp, Escherichia coli
  Strain O55:H7
  modified_base (854)..(854): a, c, g or t
  modified_base (2129)..(2129): a, c, g or t
  modified_base (2161)..(2164): a, c, g or t
  modified_base (2168)..(2169): a, c, g or t
  modified_base (2869)..(2870): a, c, g or t
aggcggggaatatcttcccgacgctcacgcagcggcggcagatgaacgcggataacgttcaggcggtggaacagatcctcacggaacttaccttcctgcacccgctgttcgagattctggtgagtggcagcgataatccgcacatccactttcaccggcgcatagccgccaacgcggtaaaactgaccgtctgccagcacgcgcagcaaacgcgtctgcacatccagcggcatatcgccaatttcatcgagaaataatgtaccgccatcagcctgttcaaaacgcccctgacgaatggtattcgcgccggtaaacgcgcctttctcgtgaccaaacagttctgattcgatcaaatccttcgggatagccgccatattcagagcgataaatggcgctttggctcgcggactgtggcgatgcagggcatgagcgaccagttctttaccggtgccggattcgccgttaatcagcacgctaatagaagaacgcgaaagccgaccgataatacggaacacgtcctgcatggctggcgcttcgccgatgatatcggtcgttgggccgttaagctgaacattacgcggctgctgctgttcctggtaatgactgatggcgcgctcaaccagcgccacggcttcgtcgatatcaaacggtttgggcagataatcaaacgccccttgttgataggcgctgacggcagcatccagatcggaatgtgcggtcataatgatgaccggaagcatcggatggcgctgtttaatctgcttgagcagtgccagcccgtccattcccggcatacggatatctgaaagcagcacatccggcgttttgctcgccagcgcctccagtacctccgngccgttctcaaatgtcgtacaggttaaacccgctccagcgagcgcacgttcaagcacccaacggatggaactatcgtcatcgactacccagactatccctcgttgcataaacgtcacctttatttcctgataggcaggtaaaccgagaactcggtatgccctggccaactggtaaattcaattttgcctgaatgctgatcaatcaaattacgagcgatggataagccaagcccggtgccaccttcgcggccgctgaccatcgggtaaaacagcgtatcctgcaaatgaggcggaatgcctggcccgttatcttccacatcaatccgcgccgccagccgatagcgttcgccgtgtaaggtcagttgaaacgcggtgcgggtacgcagaatgatttcaccgccttccggccccagcgcctgtagcgcattgcgcacaatattcagcaagacctgttcaatttgatccgggtcgtgcgccagttccggcaggctgggatcgtaatcacgaatcaaccgcacgttgtccggcagttccatcgacaccagcgttaccacgcgttcagctactttgtgaatactttcggtaacgcgcgtaccgggcagctgcggccccaacagacggtcgaccagatttcgcagccggtccgcctgttcgataatcactttggtatattccagcagtgacgggtcaggtaatgctttgctgagtagctgcgccgcgccacgtaaaccgccaagcggatttttaatctcatgtgccaggccacgcactaaatcacgggcagcaacttgttgagcatgttgtagctgttcctggcttaagcggcgctggttatccatcggcgccatctccagcaggatcatgccgtccggcatacgctgggccgtcacagaaaggatatgcgagcgaccgtcgatgaccagcgtcacttcgttatcggtaaaaccttgccccgcctccagactttcttgcatcagctcaatatttaatgagaagtagctcaacagttccggtaacggcgtaccaaacaatttgcgggagctttgggcgagcagttgttgcgcggcggggttggcgtaatggatcgccaggttgtcatcgattaacaaaatactgttaatcagcgagttgaggatctgcccagcatcgggctgcgtgcctgttgccataaagcagtctcctgaacaggttgcaccattttagtgcattatagctttttacggataaaaagcgcgaagcatcagagaattgacggagaaaaaagcccatgcaganatgggctgaaagtttccacggcaactaaatcnnnncgtnnttgcgccgggtagtacaacttcaactattagacgctgtagtacagctcaaactctaccggatgcggagtcatacgcacgcggtcatcttcttcgcgacgcagagcgatgtacgcatcgatcgcttcatccgtgaacacgccaccggctttcaggaactcgcggtccagatccagctcgttcagtgcttcttccagagagcctgcaacctgtgggatctctttcgcttcttccggcggcaggtcatacaggtttttgtccatggcttcgcccggatggatcttgttcttgatgccatcaagaccggccatcagcagggcagcaaagcacaggtacgggttagccgccggatccgggaaacgtacttcgatacgacgtgctttcggagaagaaaccaccggaatacggatagacgcagaacggttgcgtgcagagtaagccagcattaccggagcttcgtagcccgggaccagacgcttataagagttggtggtcgggtttgccagggcgttaatcgctttagcgtgtttgattacgccgccaatgtagtacagcgcctgctcagacagacctgcgtatttgtcgcctgcgaacaggttaacgccgtttttagacagcgacatgtggcagtgcataccggagccgttatcaccgaacatcggttttggcataaaggtcgcggttttaccgaagcggtgcgcnncg

SEQ ID NO: 1630 - DNA, 8222 bp, Escherichia coli
  Strain O55:H7
  modified_base (64)..(64): a, c, g or t
  modified_base (781)..(781): a, c, g or t
  modified_base (1332)..(1332): a, c, g or t
  modified_base (4918)..(4921): a, c, g or t
  modified_base (7543)..(7543): a, c, g or t
  modified_base (8169)..(8169): a, c, g or t
caacatatttgtagatctgaatttcgtcagcttttttggtcatggtattgaagcgggtagccanttcgttctgaccagcagtcgctacttcgtggtgatgggcttcaaccaccagacccatctgttccatcaccagacacatttcagaacgaatatcctgagcagagtctaccggcggaaccgggaagtaaccgcctttcactgccggacggtgacctttgttaccaccttcgtattgggtggaggagttccatgcgccttcgatatcgtcgatagcaacgtgggaaccggagatagatgatccgaaacggatgtcatcgaacaggaagaattcaggttctggcccgaacagtacggtgtcggcaatgccagtggaacgcaggtaatcttcggcgcgcttcgcaatagagcgcgggtcacggtcatagccttgcagggtgccaggttcaaggatgtcgcaacggataatcagggtggagtcggcgaagaacgggtcaatcactgcggtggatgcgtctggcatcagcaccatgtcggattcgttaatgcctttccagccgccaatcgaggagccgtcaaacattttgccttcttcgaagaattcagcattcacctgatgagcagggatagtgacgtgctgttctttacctttggtatcggtgaagcgcaaatcaacaaacttcacttcgtgctcgttcagcatcgtcagtacgtgttcagcggacatactttaactctcctggattggtcattgtcgtcgtggtaacgaaatctgcaattnttttggccgtgtcgccgtaaaaaagataaagcgaaaactgtgccaacttttaaattgcccctaaaaggcgttatcatgcttaacatcgtgcaaaagggctgcaccatgatgtgaatgttgcaccaatatagtgcttcaatggaaacattaagcaccatattggtgcaatgacctttggataaccctttttatgctccgtgaaagcgatcacaaagggactctgcaatacttgtttgcggaggatgtttgtgatcctgttttgtagtgcgattaatccgtgtacaataacgcgctatttctaatgcctgaggcaaagttgtgatcgaaaaattgcgtaatatcgccatcatcgcgcacgtagaccatggtaaaaccaccctggtagacaagctgctccaacaatccggtacgttcgactctcgtgccgaaacccaagagcgcgtgatggactccaacgatttggagaaagagcgtgggattaccatcctcgcgaaaaacaccgctatcaaatggaatgattaccgtatcaacatcgttgataccccggggcncgccgacttcggtggtgaagttgaacgtgtaatgtccatggtagactcagtgctgctggtggttgacgcatttgacggcccgatgccgcaaacgcgcttcgtaaccaaaaaagcgtttgcttacggcctgaagccgattgttgttatcaacaaagttgaccgccctggcgcgcgtcctgattgggttgtggatcaggtattcgatctgttcgttaacctcgacgcgaccgacgagcagctggacttcccgatcgtttacgcttctgcgctgaacggtatcgcgggtctggaccacgaagatatggcggaagacatgaccccgctgtaccaggcgattgttgaccacgttcctgcgccggacgttgaccttgacggtccgttccagatgcagatttctcagctcgattacaacagctatgttggcgttatcggcattggccgcatcaagcgcggtaaagtgaagccgaaccagcaggttactatcatcgatagcgaaggcaaaacccgcaacgcgaaagtcggtaaagtgctgggccacctcggtctggaacgtatcgaaaccgatctggcggaagctggcgatatcgtggcgatcacgggcctgggcgaactgaacatttctgacaccgtttgcgacacgcaaaacgttgaagcgctgccggcactctccgttgatgagccgaccgtttctatgttcttctgcgttaacacctcgccgttctgcggtaaagaaggtaagttcgtaacgtctcgtcagatcctggatcgtctgaacaaagaactggtacacaacgttgcgctgcgcgtagaagaaaccgaagacgccgatgcgttccgcgtttctggtcgtggcgaactgcacctgtctgttctgatcgaaaacatgcgtcgtgaaggtttcgaactggcggtatcccgtccgaaagttatcttccgtgaaatcgacggtcgtaaacaagagccgtatgaaaacgtgactctggacgttgaagaacagcatcagggttctgtaatgcaggcgctgggcgaacgtaaaggcgacctgaaaaacatgaatccagacggtaaaggccgcgtacgtctcgactacgtgatcccaagccgtggtctgattggcttccgttctgagttcatgaccatgacttccggtacgggtctgctgtactccaccttcagccactacgacgacgtgcgtccgggtgaagtgggtcagcgtcagaacggcgtactgatctctaacggtcagggtaaagcggtcgcgttcgcgctgttcggtttgcaggatcgcggtaagctgttcctcggtcacggtgcagaagtttacgaaggtcagattatcggtattcatagccgctctaacgacctgactgtaaactgcctgaccggtaagaaactgaccaacatgcgtgcttccggtactgacgaagccgttgttctggttccgcctatccgcatgactctggaacaagctctggagttcatcgatgatgacgaactggtagaagtgactccgacctctatccgtattcgtaaacgtcacctgacggaaaacgatcgtcgtcgcgccaaccgcgcaccgaaagacgattaatttcgttttttagtcataaaaaacctgccagcgatggcaggtttttttttgcctgtcgtgagcgcacaccaatgcgagtatctcccttataagtctgtggttacgtcaatagagagctttgtcacaattatctgcaaagtcatacgccgttaattgctttcttttttggcgtaagcgtaagatgcttcatctggtttaaaccaaaaggattaaacaatggcggagaatcaatccaccgtagaaaatgcaaaagagaaactggatcggtggttgaaagatggcatcaccacgccgggtggaaaactcccttcagaaagagagctgggagaactgctgggcattaaacgtatgacgctgcgccaggcgttgttgaacctcgaggcagaatccaaaatcttccgtaaggatcgtaaggggtggttcgtgacccagccgcgatttaattacagtccggagctgtcggcgagctttcagcgggccgcaattgagcaagggcgagagccttcctgggggtttaccgagaaaaaccgtaccagcgatattcccgagacgctcgcgccactgattgcagtgacaccatcaactgaactctatcgcatcaccggctggggggcgctggaaggacataaagttttctatcacgaaacatatattaatcctgaagttgctccgggttttattgaacaacttgaaaaccactcattttctgcagtctgggaaaagtgctaccaaaaagagacggtagtaaaaaaattgattttcaaacccgtcagaatgccgggcgatatcagcaagtatcttggcggttctgcgggtatgccagcgatcttaattgaaaagcatcgcgccgaccagcaaggcaatattgtccagatagatattgaatattggcgatttgaggccgtagacctcatcattaatctgtaggtgttttatggtgacaataaataacgcaagaaagattctacaacgtgtcgacactcttcctctttatttacatgcttatgcctttcatttaaatatgcggctggaaagagtgttgcctgctgatttacttgatatcgcaagtgaaaataatctacgtggcgtcaaaatccatgttctggatggcgagcgtttttctcttggtaatatggacgataaagaactctctgcctttggggataaagcccgccgtctgaaccttgatattcatattgaaaccagcgcctcagataaggcatctattgacgaagccgtcgccatcgcgttgaaaactggggcatcgtccgtacgtttttatccacgttatgaaggtaatttgcgcgacgtattatcgatcatcgctaacgacattgcctatgtgcgggaagcgtatcaggatagcggcctgacttttacgatcgaacagcatgaagatttaaaaagtcatgagttggtgtcgctggtcaaagaaagtgagatggagtctctttccttactgtttgattttgcgaatatgatcaatgcaaatgagcatcccatagacgccttaaaaacgatggcaccgcatattacccaggtccatatcaaagatgccttgatcgttaaagaacaaggtggcctgggtcataaagcctgtatttcaggtcagggagatatgccgttcaaagagttattaacacaccttatctgcctcggtgatgaagaaccgcaggtgacggcatatggcctggaagaagaggttgattattatgctccagcgttccgctttgaagacgaagatgataatccgtggatcccttatcgccagatgagtgaaacaccattgccagaaaagcatttgctggatgagcggttacgtaaagaaaaagaagatgcaattaatcagataaatcatgtgcgtaacgtactacaacaaatcaaacaagaggcgagccatcttctgaaccactaacaagttttaactcatacgcagttaataaaaccattccataagaatggtcggtatcttattgcctttaaaacagtgatttnnnnaatcgcttaggggatgttatgctcacgaaaaagaaatgggcgttatttagtctattaacactgtgtggcggtacaatttataaattaccgtcgctgaaagatgcgttttatatcccgatgcaggaatatttccatttgaccaatggtcaaattggtaatgctatgtcggtaaactcatttgttaccacagtgggcttttttctgtctatttattttgccgataaactaccgcgcagatacaccatgtcattctcactcattgcgacaggattactgggtgtttatttgacgacaatgccggggtattggggcatcctctttgtctgggcgctatttggcgttacttgcgacatgatgaactggccggtcttgctcaagtcggtaagtcgattgggcaatagcgaacaacaaggtcggttgtttggcttcttcgaaacagggcgtggcattgtcgataccgtggtggcattttctgcgttggcagtatttacctggtttggcagtggcttattaggttttaaagcaggcatctggttctattcccttattgtgattgccgtaggcattactattttctttgtcctgaatgacaaagaagaggcaccgtccgttgaggtgaaaaaagaagacggggcatcgcaaaacaccagtatgacctcggtgctgaaagacaaaactatctggcttatcgctttcaacgtcttcttcgtttacgcggtttactgtggcctgacattcttcattccattcctgaaaaacatctatctattgcccgttgcgctggtgggggcttacggcatcattaaccaatactgtctgaaaatgattggtggaccgattggtggcatgatttcagataaaatcctgaaatcgccgagtaaatatctatgctacacctttatcatcagtaccgctgcgctcgtactgttgattatgctgccgcacgaaagtatgccggtctatttagggatggcatgtacgctgggctttggcacgatagtctttacacagcgagccgtattttttgcacctatcggcgaagcaaaaattgctgaaaataaaacaggcgcggcgatggcgttgggtagctttattggttacgccccggcgatgttctgcttcagtctgtatggctacattctggatttaaatccggggattattggctacaaaatcgtgtttggcattatggcctgcttcgcattctgtggtgcggtggtttccgtaatgctggttaagcgtattagccaacgtaagaaagagatgctggcggctgaagcttaattaatggccggatgtacttaatccggccaacgaaaaccgtatcaaccgtaggccggataaggcgtttacgccgcatccggcagtttcacatcagaagaaatacttcgtcccgatacgaatctggttttgctcgcggtggtacggttccacgttgcgatctaaccaacgcaattcaatatagggcagccagtgctcgttaatgcggtaacggaaggtgttagtgatttcccagtgatgcttcgtgccattgccgctattgaaatcattaatgttataaaaataatgcggctcaaaggtatatgagaacttatcggtaataataaagttccagtagttgccaatctcgtagctgtcattattatccagatcaccgtttaaatcggttgagctgtagttattatggttaaaacggttgcgcactgtcaggttaaaccacggagtaaatttgtagttaacatccagataaacagcaccacccgaaccgatactcttatcattaattaagccaccgggctggatggttaatttatcggttggtttaaataacggataccaaccttcgatttcgttatatccatgttttagttcatcttctcgctgaaaggtgtaggtattggttaacataatacccgcgcccatatcgaagttataacccacacgtagcataacctcgccctgatcggaggcgagattatatgcctccctgttttcgacgtatgcgccagcgaatactgaggcagaggtcagagaagataataaaattattgcattaatatttttcataataagtccatttttaaacgtagggaggccgccacccaccaggatggaaatagcggctattgacatttataacgttacggaagccgttttttcttctgtcgccatctctttatttttgcgttggttgatttcctcaataatcaacgcaaaccgtttttcattgagtgtgtaaaagaatcccatcgtcaatgcagcaataattgccagtgcacaaggccagataaaaatgagctgacgcaaaccctgtaatgtcgcatcactttgcgcgatgttgggaacataaccgatttgcgtcagcataatgcctggcaagaagccagcaagtgcggcagaaattttacgaaagaaggtataaccggtataaacagaaccttcggcacgaataccggttttccattcaccgtaatctacggtatctggcaccagtgcccagttcaggctgtttacaaaggccgtgccaaaaaaggcgatacaagagaacatgacgaaagtgaaagagttacttccccagaaataattcaggatatcaccaaccgcccatagcaccatgccagntaaataaacctgttttttaccaaaacattttacagttaatggcaccagtaatacgccgacgaggatgcatcccatactgaagaatcccatccacgacaataaattaatatcattcagcacatactgggtgtaatagacctgaatcgccagtttgatattaaatgccgccagggtacacaagttagcaatgcataaaaccagcaatggcggattccgaaatatcgcgcaaaaagatttgagaatactggctttatgtccggttggtgctgtgtccacataatgctctttgacgcctctgtagcacagcatcataaaaataaagccaccaatggagaacatcagtgccgcacaggcataaccgacggttgagtcagaaaaaagcgactgcaacggaataaacgccacggtacaaatcaatagccctatggttgcaccaccctggcggtaagccgcgagctgcgcgcgctcattcgggtttttagtaatggccgggatcatcgcaccatacgagcagttcatcagactgtatgaaagtccaaacatcataaacagcgcggtggcaatcgtcgttttaaccggcaaactaaaagtggtggcgataaactggagcgttgcaattaacgccnccggaaccgctgcgtataaaataaagggacgaaatttgcctttaggcccaata

SEQ ID NO: 1631 - DNA, 7793 bp, Escherichia coli
  Strain O55:H7
  modified_base (5655)..(5655): a, c, g or t
  modified_base (6513)..(6516): a, c, g or t
  modified_base (6937)..(6937): a, c, g or t
  modified_base (7052)..(7052): a, c, g or t
  modified_base (7105)..(7105): a, c, g or t
  modified_base (7131)..(7131): a, c, g or t
ccgcgaatcgagtaaaaatccggtgagcatatcggtaaacgcggtaaaaaacttcgccaccagaaagataatcccgccatagtaagctggcatccctaattcatcggtataaaatttgaggagatacagagtaccgatgctaagcattaaattcgaaccaacgtcgcccataccataggcgattttttcccgcagattcagttttaatgtcagtggattatggtcagacataatcactccttataacgccccgcagggcattgtttattattattacgccgtgcgtttacgggcttctatttcttcaacaatgcggacatacatcttctcgttcaggctgtagaagcagcccatcgccacaatggtgactaccgccagtgcgcttgggtagatgaagatcagctggcgcaacccttcaatggtgtggtcagcctgcgccacgttcggcacataaccgatttgcgtcagcatccagccggggaagaaaccagccagcgcctgagacactttgcgaaagaaggtgaagccggtgtagaccgttccttccgaacgaacgccggtacgccactcgccgtactcgacggtgtcggaaaccagcgcccagttcaggctgttaacaaacgctgagccgaagaatgccaggcaggagaacgccacgaagctgaccgaaccgccgctgaagaaatagttgagcagatcgcccagcacccaaatcagtaggccgccgatatagaccttcttcttaccaaaacgcctgactgcgccaggcatcaggaacacaccgatgaaaatacagcccatgctgaaaaatcccatatatgacaacaggatgggatcgttaagtacgtactgggtgtaatagacctggatggcgagcttgacgttaaacgcccctaaagtgcagaggttggcaatgcacagaatgaacagtgggcggttaccggcaattgcgcggaaagattgcagcaggccaggcttttgcgccggattggctggttgggtttcgacataacgctctttcacgcccgagtagcagatccacataaacagcaggccgaacagtgaaaacagcgtggcggcgaagatatagccaagttgctgattaccttcgataagattcataaccggcacgaatcccaccgtgcacagcagcaggcccagcgtagcgcctccctgacgccatgccgccagtgatgcgcgctcgttggggtttttggtaatagcaggcaccatcgcgccataggagcagttcatcatgctgaaaaacagcccgtagagcataaacagaatagtggccatcaccgttttaccagtgacatcgaacggtgtgccgataaagttagcgattgccaataaggtgaccgggaatgacgcgtacaaaatgaaagggcggaacttacctttcgggccaatcttacgccgggaatccaacatgatgccggttcccatatcggtaaaggcggtaaagaatttcgagatcaaaaagataatgccgccataggtgcctggtagccccagaacgtcggtataaaacttcaaaagataaagcgtaccaatatccagcaggatgttagaggccagatcgccgataccgtaagagagtttctctttaaagggcaggcgcaaagttgccggatcttccgttgtgatgtgactcatcgttattctccatttgcccgtgagtttccccacgggcgggcatgattagatgttttttaacgaggcgaacagtgcagcccattcgctgtcggcgcgataaaagaccggcggcttgccgatgggcgcttcaacagttatttctccaccgtggaaggtttctccggtccaggcgtggacccagttatcctctggcagatagagcgtccagtcgctgcgaccttcttcgtgtaccggagcaaccagaatgtcgcgacctaacaggtactgatatttcagggaataggtctgcgcgtcgtcttcgtaatgcaggaacagcgggcgcataaccggcaggccggacttcgcattcagcgcgacggcctctttcaggtaaggtttcagggtggtgaagacggtggtcatacgggcgaaatgggcgatggtttccgcgtcgccgtcaaactgccagttgtcgccaggacggttaccttcgtgggtgcgcatcatcggcgtgaaggcgctgaaatcgcaccagcgcagcagcagctctttgctgcgcttcatctcaaacagggtggtataaccgccaatgtcgctgtgatgccggccatgtccggtcattgccagagatagcgccgccgggacaaccgacgccaggccatcgtccagactccagtccacgttctggtcacccgcccacatcatggtggagtatttctggctaccggtagaaccggcgcgcataaagaagaggatctcgccgagcttgcccgtttcttcaagggcttcgtagttacatttcgcccacagcgcgggccaggcgttatgcataatttccgcgctgatgccgttatgcaggtacgtgtcggtgggcagatactcgccgaagtcagccatccagccgccgcagccgagttcaatcatgttctttttgataacttccttgaaccaggcgtaggcttccggattggtgagatcgacaacgccgccgtagaactcgccaaactccaccagatagtcgccaccggcgacatcttttgccagataaccgcgctttgccgcctcttcgcagagatctttatcactggcaacatacgggttgatataggcaaggaactgcacgccctctttgttccactgcttgatacgcgaatccagttgcgggtagttttcgctgttccacttccagttccacatcacgcgtttgccaaaagaggtcatacgaataccggaccagtcctgcgcccagatgccgttgaccttcacgcccgcgttacgcatggtgtccagtttcttctggcacacttccgtcccgccctgaatgccgagcgttactccgtcataaatccagtcgggcagttctggctggcgtcccagcagggcggttaatttttccagcagggagatgtatgtgtcagcacattcaaaacgcagcgttgctttgtcttcccacagcgccagttcatggtattccggggcactaaagtcgaagttcatatagcaactgttatcaacatggcagtaatacttctgcgtgctgacaaacgtaggctgtgggaagaaagtccagtaatagtcgccgcccgcattttctttgcagtcggcctgccaggtgacataggtttgtttgttgcgaccaacgccttgttcactggtccatagcgggaacggtttgccgcgcagatcgaagtaggaaaactgttcgccgcagccgtagatatggtcctctggttgagcggcaaggcgcagccagatgcggttgtggttaaggttgtcgttttgtagttccagcaataaacggccctgatcgtcggcagagatattcagcgtggcgctaatgtcagaaccacgactgaaatggattaaccaaccatccggtgactggctgacgatggcgtcggtaagcgcaattttctcctgtagtttatctttaatgctgaaattgccgcggaacatatcgatgtccgctatacctgagccaatccataaacaaggattatctttgctatgggttaaaataagacgttgtcgaaaatgtagggtaaaactgtcgttattctgatgaaattcaaaatctggtaattgtgggcgtggcgtatccataaataatctccatagagtataaagctaatatttcatgccatcctgttattacaggtttaattaattaaagaatgtgtgcggatataaatttaaacccgcataagtgattatttacttgcttcagcctgacggattgccgccacttttttaccaaataccagttgcagtataactaacaaggtaaacggaggtagaagtgcggcagcggcgggaattcccagcgcgccttttatcaacatggaaccggaggcaatcagcaataaaaagaccatcacacggaacactttgactgaaatacgtttatgcacatattgtccaaccagtgaaccgaggatcatggtgggaatacaaaacagcaccagtttaaagatcgaaacagtcaaaattccgctggtcgccagcccgccgatcaccgcgatgttgtttgcggtgaagaaagcgttcagagtgccacgaaatgccgccgggcctaagttacgcagcataccgtagataaccatcggtggtccgttggttgagaaagctgcgcctaatgcgcctgctactgcaccgataggtgcggcgatccagctacggtcataaatcggcaggcgtggaataaacatactgtaaaaggagtacaggataaggaatccgcctaagcccactttcataaaatggtcgggtaaatacgacagtgcatataaaccgacgggtattcccagaaacgagaaaataatcagtaccattgccgatcgccaatccgtttctttacgtgacagccaggtggcgtacaaggcggtcgcggtgccgacaattaccgagagtggtgttgccatttttacggggagcattaacgtgacgagcggcatagtggttaaaccaccgccaaatcccgcgcatatccccacaaaggtataaagaaacattaacgcgataacgatacataccacgtttgtttccagcatgaccccatccgatgaaaataacgtaaaaaagtccataatatttcctgttgtgtaaatacaactctaaacaatgatctcgttcttttcttaataaaattaattgtgttgcccgtaaatattaaaaaacaggcggtgcgttttccctggttccagtaataataagtcgagacctgaattaaaggcgttaggcgggcaactcataggttcaactgccagtccctgacgctgtaatttttcaccgctataaatttgtacccagggttgatcggaacaaaggctaaccgaaagcgcctgttgtggatgggtaatggttatttcccacagatcattagcggttttaaaggtgtggtcgatttttgtcgcggctatttttttcgcctgcgtgaaatttaaatccagctcatcaacgtggtgaagcgttgtcggattagcgtgctcatcgacggcataaacctggtttgccggaagctggaacagatattcatcaacagatgttaagttgcaggttaaataaggatgaatacccacaccatagggtgcggtcacagtaccaatattctgacttgcgatctcaacggaaagacccgtgcgtgcattgagcgaataaacaacctgcgaagccagcataaacggatagccgtaactgggcggcagaaaagctgtcagggtaacgctggtggcggttaattcgctgatttgccagtcacgccaggcgagcagcccatgaatagcggcttttgaaccatgttcattaatgggtaactgatattcctgcccctgatagcgataacagccgttggcgatccggttcggccacggaataaggactttgcccagatgtgccagcggcatctcttcgggtttatgtggaataactaaatgacagccctgaaaggttaattcagccagacctgcaccgacggtcacaatggtcgcgtgataatcccccgcggcaagtgaaacggtntgtccactgcaatgcatgttggtgatttgcatacgaggtacctttattgaataacgacatacccggcgtgcagcctgatatgtcgtttttttagtcagttatttcgcgttaatatccagcagacccgccgcaactgccggagccaggcctggcgctaacgggatacgcgggatcaccaggcaatgcagcaggtgataaatatcctgtttgccgtcccagactttggtggtgaccttattgtccgcatccagctcctgccaccatgaaccattttcgtagtccatcaggtatttgatgcagtagtcccaccatgtctgataccaggtttcgtactggcgatcgccggtgacggtgtagagcgcgtaggccgtacccatcgcttcgacgataggccaacgcacacgttcgcggaccaccggttttccttcccagtcaacggtataaacaatcccgtccgcaccatcgggtgcccaggcatcacgcacggtggcgttaaacagacctttggcatcttctagcagccatgctggcggttgttcgcaacgggcttccagggccgcgtggatgtgcagcattaaacggccccattcgatccagtggcctggtgtacctccgaacgcgcggaagcggtgcgccgggttatctttgttgtaatccggcagcggattccactgggtatcgaagtgttcgttaacgcgataatgattatttcttgcgacgtcgtggataatcacggaagccacgcgaatcgcgcgatccagccattttttgtcatgcgttacgtcataaacaattaagaaagcttccactgcgtgcatattggcattgccgccgcggtactcttcggttttgctgaannnntcgtcccaggactccaggcacatctgctcttcttcgctccagaagtatttctcgataatttcaatggtgtaatcgagcagcttgcgcgcttccgggtgacccgttgtgacggcgctggcagcacccagcagagcaaagaaatgttgatagccctgtttggaggcatccaccacgccctcgtcattcacacaggcataccagccgccatattttttatcgcgcagtgcgccgttcatggctttaataccgtgatcaaccaacgagtaagcgccaggtcgacccatcgccgcagcaacggaataaacgtgcaacatacgagctgtgatccactgatgggtgcccatctcttctttgatttgccctttattgcctaaccagccaaatccggtcggtactacggaatttttaccaaaatcaaagntgcgatcggtttcctgttccagccaacggttgtgacttaaagtgttaaaccatttcatttttgtatccccattttaacggcgtttagccatcatttcgtcgacgatatcgccaanttgttgtaatttcggtgcgcaaacgtcacgcagcatcagctcgttgtctggtnaaccgacgaccgatgcccagacagcncgaccagccaggaagcccgatgcacccgctgtcattgccacgcgtacggcacgcgggaacagtttttcgtcgacaccggaagagaggatcacccacggcatattgatatggtcattcagacgttgtgaagcactgagaagctcttgttgcggacctttaccgtaaagcggcatttcaactttgtagaggtcagcgccactgtcgcccagctctttggcggcatcgatgatcgcttgttcgcgatcgaatttatcgccacgacgtggtgggcggacgactggctcaataatgcttaccaggccgtgtgagtggcacagttcgttaaactctttcaccatatccaggcgttgctgcgcatcttcatcactacgccacagcaccagcagttttaaggctttgccaccgtcttgtttgatctgtagcggattgattttgcggtcaatgaccacgctatctaccggaataccgttgccaggaatgaactcatcggcggcgacaatcatggcgcaacttttggcaatcgcgttttgctcaaccacctggcggtaacagaattgttgatctaccagaatcgccgaggcataaggcgagagggtcttcgccgcgttaactttgaaatcagttaaaacgctatcggctaccggagcgggtgccccagccgc

SEQ ID NO: 1632 - DNA, 15409 bp, Escherichia coli
  Strain O55:H7
  modified_base (85)..(85): a, c, g or t
  modified_base (165)..(165): a, c, g or t
  modified_base (194)..(194): a, c, g or t
  modified_base (372)..(375): a, c, g or t
  modified_base (1021)..(1021): a, c, g or t
  modified_base (2866)..(2866): a, c, g or t
  modified_base (5539)..(5539): a, c, g or t
  modified_base (6237)..(6237): a, c, g or t
  modified_base (8040)..(8043): a, c, g or t
  modified_base (8746)..(8746): a, c, g or t
  modified_base (9017)..(9017): a, c, g or t
  modified_base (11479)..(11479): a, c, g or t
  modified_base (14158)..(14158): a, c, g or t
  modified_base (15037)..(15037): a, c, g or t
cgcatggcttcgcgctgatcgaccgccagcatggcaaaaccgcccgatgcgcgcgtaatgtcgttgatggtgtacttattcattnatttattcctttatccagtcgttacatttttactttggcagtcatcccggcactgacacggacctgttccagaatggcgnaccagtcctggcgaccgcgacccgctgcncgcgcctggctataaacctcccgtgaggcggcccccagcggcattggcacatgcagctggttggcgacatcaagggcgatgccaagatccttatgggcaagatcgatcatgaaggcgggagaaagatccccgctgaggactttgttcggccaggaagtggtgaagtggcctttaccgnnnncggtaccgctcatcactttgacggcaacatcgaagggaagattcagggcttcgcacaaaacggcagcttctgccgaaagcgcattgagcgcgatgctcatatagttgttgatgagcttaacgcggatccccatgcccggaccgcctgcgttgatcaactcactgcccatcgccatcaggatcggcgtggcacgttcaacttgttcagcggtgccgccagccagcagtaacagagtaccggtaatggcatttgcagaagtacggcctaccggaacatccatcatgttgaagcctttggcttgcatatcggcaatcaatttatcggtttgcagcggatggatggtcgacatatcaatgaccagcgcatcggtagataagctttcgcaaacgccgttttcaccgaacaacacgctgcgcaccagatcgccattcggcaacatggtaatgataaattcggcatctttagcggcctgcgccgggttggcggcgggagtcgcgcctttgtctaccagatgccgcacagcctcggcattcacatcaaagacgcgaagttggtgcccttgctgcaataaattgctcgccattggcgaacccatttgtcctaaaccgataaacgcgattgctgccataaccttctcctgaatacngtgatgtcactttttgtcatttatgacacgctttgattgtctgtttttgatcgtatttgtaatttatagtcaaaaaattgacagccgtcactttttaaacaattggtgaaattaaaatgaacgcatcccaaaatgtttaaggaatgaccatgattcgtgttgcttgtgtaggtataaccgtgatggatcgcatctattacgtggaagggttaccgacggagagcggtaaatacgtggcgagaaattatacggaagttggtggcgggccagcggcgacggcagcggttgcggcggcaagactgggagcgcaggttgattttattgggcgcgtcggtgatgacgacaccggcaacagcctgctggcagagctggaatcctggggcgttaacacccgctacaccaaacggtataaacaggcgaaatcgtcgcaatccgccatcatggtggatgccaaaggcgagcggataatcattaactaccccagcccggacctgctgcctgacgcagagtggttggaggaaattgatttctctcagtgggatgttgtgctggcagatgtacgctggcacgacggcgctaaaaaagccttcactctggcccggcaggcgggcgtgatgaccgttctggacggtgatattacgccgcaggatatcagcgagctggtggcattaagcgatcatgcggccttttcagaaccgggtctggcgcgcttaacgggcgtgaaagagatggccagtgcgctaaaacaggcacaaacgctcacaaatggtcatgtctatgtgacccagggcagcgcaggctgtgactggctggaaaatggcgggcgtcaacatcaaccggccttcaaagttgatgtggtagataccacaggtgcgggtgatgtttttcacggcgcattggcggtggcgctggcaacaggtggggatttagcggagtcagtccgcttcgccagcggtgtagcggcgtcgaaatgcacgcgtcccggtggacgagccgggatccctgactgtgatcaaacccgatcttttttgtcactttttgtataaaatgccagggtgatggtttttcgaggaattttcatgagccttaccgaactaaccggtaacccgcggcacgaccaactcctcatgctgatcgccgagcgtgggtatatgaatattgatgagctggcaaatctgctggatgtctccacgcagacggtgcgccgggatattcgtaaattaagcgagcaaggcctgattacgcgccatcacggtggcgcgggtcgggcttccagcgtcgttaatacggcgttcgagcagcgtgaggtttcgcaaaccgaggaaaaaaaagcgattgccgaagcggtggcagactatattcctgatggttcaacaatatttatcaccattggtacgaccgttgagcatgttgcccgggcgttacttaaccataatcatttgcggataatcaccaacagcctgcgtgtggcgcatattctttaccacaacccgcgctttgaagtgatggtacccggcggtacgttgcgctctcataatagcgggatcattggcccttcagcggcgtcctttgtggccgattttcgtgctgattatctggtaacaagcgttggggcgattgagagcgatggcgcgttgatggagtttgatgtaaacgaagctaacgtggtgaaaacgatgatggcgcacgcgagaaatatcctgctggttgccgatcacactaagtatcatgcttcggcggcggttgaaattggtaacgtggcacaggtcaccgcgctctttaccgacgagctgccgcccgctgcgctaaaatcacgcttacaagacagccaaattgaaatcatcnttccccaggaagacgcgtagatttttgtgactgttgacctggcttcataccttgccacatagccaaacccatcctttcccgctacagttaatttcttgtggcgcgaaaggaggcaaaaatgctctatatctttgatttaggtaatgtgattgtcgatatcgactttaaccgtgtgctgggaacctggagcgatttaacgcgtattccgctggctacgcttaagaagagttttcatatgggggaggcgtttcatcagcatgagcgtggggaaattagcgacgaagcgttcgcagaggcgctgtgtcatgagatggctctaccgctaagctacgagcagttctctcacggctggcaggcggtgtttgttgcgctgcgcccggaagtgatcgccatcatgcataaactgcgtgagcaggggcatcgcgtggtggtgctttccaatactaaccgcctgcataccaccttctggccggaagaatacccggaaattcgtgatgctgctgaccatatctatctgtcgcaagatctggggatgcgcaaacctgaagctcgaatttaccagcatgttttgcaggcggaaggtttttcacccagcgatacggtctttttcgacgataacgccgataatatagaaggagctaatcagctgggcattaccagtattctggtgaaagataaaaccaccatcccggactatttcgcgaaggtgttatgctaaaaaccattcaggacaaagccaggcaccgtacccgtccactatgggcctggctaaaactactctggcaacgcattgatgaggacaatatgacaaccctggcaggtaaccttgcctatgtgtcgttgctctcattagtgccgctggttgccgttgtttttgcgcttttcgccgcttttcccatgttttccgacgtcagcattcagttacgtcactttatttttgccaactttctgcctgctactggcgatgttattcagcggtatatcgaacaatttgttgccaattccaacaagatgaccgccgttggggcgtgcgggctgatcgtcaccgcgttattgttgatgtactccatcgatagcgcgttgaataccatctggcgcagtaaacgagcgcgacccaaaatttactcgtttgccgtgtactggatgattttaacgctggggccgctgctggcaggggccagtctggcgatcagttcctatttgctctccctgcgctgggcgagcgatctcaatactgtcatcgacaacgtgctgcgtatttttccgttgctgttgtcgtggatctccttctggttgctgtacagcattgttcctaccatccgcgtacctaaccgcgacgcgattgtcggcgcgtttgttgctgcactcctgttcgaagcaggaaagaaaggtttcgcgctttatatcaccatgttcccgtcatatcagctcatttacggtgtgctggcggtgatccccattctctttgtttgggtctactggacatggtgtatcgtcttgcttggcgcggaaattactgtcactctcggggaataccgcaaactaaaacaagcagctgaacaagaagaagacgacgaaccatgattgcattaattcaacgcgtaacccgtgccagcgtcaccgtggagggagaagtgacgggcgaaattggtgcgggacttttggtgttattgggtgtcgaaaaggatgacgacgaacagaaagcaaaccgtctgtgcgagcgtgtgctcggctaccgcatctttagcgatgccgaaggcaagatgaatctcaacgtgcaacaggcgggcggcagtgtgctggtggtttcccagtttaccctcgccgcagataccgaacgggggatgcgcccaagtttctccaaaggtgcatcaccggatcgcgcagaggcgttatatgactatttcgtcgaacgctgccgtcagcaagagatgaacacgcaaacaggacgcttcgctgcggatatgcaggtatcgctggtcaatgatggccccgtgacattctggttgcaggtatgagccagcttccagggttgtcacgggaaacaagagagagtatcgctatgtatcaccttcgggttccacaaacagaagaagaattagagcgttactatcagtttcgctgggaaatgttgcgtaagcccctgcatcaaccaaaaggttcggaacgcgacgcgtgggatgcgatggcgcatcaccagatggtcgtcgacgagcagggtaatctggtggcggtaggccgactgtatattaatgccgacaatgaagcgtccattcgctttatggccgttcatcccgacgtgcaggacaaagggttaggcacgctgatggcgatgaccctggagtcggtggcgcgtcaggaaggcgttaagcgcgtgacctgtagcgcccgtgaagacgcggtggagtttttcgccaagctggggtttgttaatcagggagaaatcaccacgccaaccaccacgccgattcgccattttttgatgattaagcccgtcgccactctggatgatattttgcatcgcggcgactggtgcgcgcagctgcaacaggcgtggtacgaacatatcccgcttagtgaaaaaatgggcgtgcgcattcagcaatataccgggcaaaaatttatcactaccatgccagaaaccggcaatcagaatccgcaccatacgctgtntgccgggagtttattctcactggcgacgctcaccggttgggggcttatctggctgatgctgcgcgaacgccacctcggcggaacgattattctggcggatgcgcatatccgctacagcaaaccgattagcggtaaaccccatgcggtagccgaccttggtgccttaagcggcgatctcgaccgtctggcgcgcggacgaaaagcacgggtgcagatgcaggtcgaaatctttggcgacgagacgccgggtgcagtgtttgaaggcacgtatatcgttctgcccgcgaagccatttggcccgtatgaagagggcgggaacgaagaagagtagctgatggagaggggcggtgctgcctctctcattcaggtcatttatattagtccttggctatttcggttatattgaataagaactctataaatttttattcttcgttggctccatacgtgtcttgctacatcactgttcaggagcatttaaatattatttgtagagctgtatagcaattatcgcagataatgcttaattcatcatcttagttcaggtttgagcgatttttgatagtcaaaaccccctctggtgccatagttttctcataaatactttaaaaatctatagctaacaaacattatgcaaagataatgggctggcatcattgtcagtatcattcatttactgctctggatgttataaatanttatgtagcatgtttgctcttaaaccgtgggaaggaggctgtaatggttgccaatattaatctcattaaacaagaaagttattctgttgttaatttagaaaaacaactaatgagtaatgaatcaccgaagcaatcgctattaaatgatttttcacatcgccttaaaatggaaggtgaggaacaactgttccattgtgttaacgaactgaagtatggtttgtcgagtaataatgaatatgacctgtttaaaaatagagaaacctcactgtggaaacgcaaagtaccagaaagcgcagcgctggcaatgacgggaacagtatataaattatttggtagtcgcttactcaacgcccgcaatcagttagataaaaatctcctcgaaatggctatgcaaatggtttatggcaaagatatggtgacaaagtccggggatatattgattgatatacaattaaataaggatggcagcctccagagtaagcactacacatttgatgtaggtgaagttataaacagttataatattgacctctttgtgaatgcttcgagtattaatcaaacttacttacatgataaaaatcctggtgatgttattagcctgtatggcactttagataacattcctcttgtagttaaggaatgcacgggtaaaaatcatcaaattaacgttaaagccaaattgccacaagaacgaagtgaaaaagttgaggatatgtgtgaaagaatgagaggtggcatctctatgtttaatcacaccacaaaaacagctggtaatatagagcataatttgcagctaagttttctcgtggattcacggccgtcgatcaccaataaatactcagccaaagatgtagcgccagacatacttgtattgcccgtcaacgtatatcatgcggattttaaaattaaaatcaataatgcagtagagaagacttcgtcaattgtgttatgtgctgtgcaaaaaaatctccatgcagcaaggaaggttcttagcgggataataggtaatgtaccaaaaaataataaaccaaaaacaatcatttttgatttacgttttcttagtgcaattaagcagaaagtttttttgggcagtgaacaaccgttgtttgtaaagcataccgcaatgatgagggaggcatgtaaggaattaccgcagctagtggagtatgttcctttagcctgtgaagcgcatagccatcgcagcgtcgcccttgccaaaaccgtggctgcacccatcatggcgacaggtgtgggcgcggctttaatgtatgcaacatcatcaggaccgtattatgcgcaaagtctttctggttcgccggatatcgagatgataaaaaaacgcatggctgaattgtttaaccagtcggatacttctgtgcgcaacaaatatcgcccggcttttgataaatggaataaactggtagataaattaaatcacgaaagaaatacagttccgtttgcgtgtttgaccaccattatagcgacagcgataaatgaaactcctgagggggatacgaatgttgccgttgtgatggggtgtaaatctgcgaaagatcgcacgatatccattgtccttggcaactcgatgttgcaaacactctttgaaaaacgcctcgccgatgatggagaaatagaaaacctttttgatcaacagggatattttagttgcgattcattaacagccgaagaagtaatgatgttaaaagacctttttgatattcgagttcttcatctctctaacaaatttaatgttgggttgcaaggtaatatcaacacggatgttttacaagattcgttttttannnntgtcgatttcattcatgaatctaactcgtataccgtagggatgggagtctgaagagtaaaactcattaggattatcagaattcggccaatgcattgcaaaaatgaaatacaaagagagatgtgtgcaggcgcttagccgcgaggggcatggcgaagccatacagaaagcaccagcattcagaactcctgtgaaagcggcatagtgccgctgctcaggagttttgttatgacccgtatcgtgctgaacgttgccaccctatgatgcgattaaaaaaactcaccgtcgagccgatgattgacgtcaatgctatcggatgatgccgggggtgttccggaaggaattccttgtttcccgaactgttaccaacaaaattataacgatgagcaagtaaagaccggttggtggcagtactgaccggtctgtgatggaagattaatttcaccttaaatcctggtgctgttaggatgctgacgtttttcgggtacaccattcagattatgcaaataaagattcaatgaaaaaataaatatccctgaatataatatattcgtagcacccataactcatcctgggcgataactaaaccatttttgagtaacaaatgaaacaactgcaacgctcttattatttctggaaaacgtctcgcaaaaacaaaacaacatgcaaaaatccgctttcgttaattaatttttcggcgtaatnttcgcacatacattaatgagtaatatatgtaaggtggtggtaatggcgatgaatacggtttttcttcatttatcagaagaggcaattaaacggctgaacaagcttcggggctggcgtaaggtttcacgatctgcaattttacgcgaagcggtagagcaatatctggaacgtcagcaattcccggtgcgtaaagcaaagggaggcaggcaaaagggggaggtagttggtgttgatgatcagtgtaaggagcataaggaatgacaaaaatttntcattcttgaatataaaaaacagatgcccttattctggtattaatagaaggctgttttacttgaacttataataactgcaactgttacatcatatctggaaaacgcctcgcaaaaataaaaaatgatgcgtaaatgagctttctttaaagattcgacaagggtacttttctctccatagatatcaaatgatattggtcaaatatttatgaactctctggcaggtattgatatgggcagaattatactcgatttatcgaatgaggtgattaagcaacttgatgatcttgaggtgcagcgtaatcttcctcgtacggagctattacgggaagcggtagatcaatacttggtaaatcaatcgcaaacagtaagaaccagtgcttttggcatatggcaagggtgtgaggaagatggtgtcgaataccagcgtaagctgcgcgaggaatggtaatgggaaaaaatgatatcaatcagattgctgacaacgtgcgcgttgttcatgccggatgcggcgtgaacgccttacccggcctacaaagtcgtataaattcaatgtattgcagtttattggtaggcctaataagcgcggcgcatcaggcaatcttacgcttatcatcagtctcatacccataaccttattgatgtgggggtgggtaaattgaggcaaaacaggcactggcggcatagcttgaggtggtaacgcggaatacgagagatggtgtcgtcacaccctatgagctgtaatccgggcgaccagcgccacccggaaaacgtcagagattactccccttcacccggaaacaggaacgggttgatggaactgcgggcatagccttcttgctccattcgcgcgtccagtaccagagaggcgaggtcatctgccacggcttcaactttcggttctttttcctgatagagaattttcaggtaagtgccgcagtcatcgcagctttcggctttaatcgcggcctgttcgtcatccagcgaccagtaatgcagtttgccgctctgctcgcagttgctgcattttacgcgcacaacgtgccattcagtttcacacaggttgcagtgcaggtaacgtagcccctgagtggtgccaatttgcaccatgctggacaccggcatagaaccacaaaccgggcaatattgacgttgctcgccgtattcagcgcgggctttgccggggatcagattggccatctgcgcccagtagagcgacagtgcagcccagataaacggcgctttatcgctgctgacggacgagaaatcagaggcaaacagtgcgctggccatatcttccagctcctgagtcgatgccttctccagattctcaatcactgccagcgccgggccgctcatttcaggtttcagctcagcaatcagcgccatcagcagcttttgccagtgcttatcacgcggcagaacgtgaatatccagcgggggcttgccttgtgcgctggcttctttaatgcgcgcagtcagatccatctccagcggatggtcgtacagcaccacttcctgggcgtgggcgataagcgcagcaaagcgcaggtaatcacccagcggattattttctgccagctcgcgcagacgctcggcgcggcggttgtataaattcttgagccgagggaacaataacggcggaatcatatccgccgtacgtttctcgctcgaacccagctcatcttgcgggattatgcgaatactcattcagctttcttttccgttgtcttgcggacctcacggtaccagcgcgggtgatgtttcttcgcccaggcgctggtaacccatccttccaccatggcggtaatcgtgcctttcacccaaagggcggcgtagatatgcaccatgataaccacaattaacgccactgcggcaaatgaatgcagcattaacgcgaatcggatcaccgggattgagaaagcaggcgcaaaataaggacgccagataatcacgccgctcaccagcagcagaaccaggaaaataatcgccgcccagaaaacgcatttctgaccgaagttataacgcccggtgtcacctacttcctcgttgacgacgatcttacgaatattcttcgcccaaaagatatcatcccgattgattaggttgtgatgccagtaacggaaaaacatgatgatgaacgaggcaaacataaccacgccgacaaacgggtgcagaattcgcgccagctgcggtgtgcccatgatttgcatcaaccagttgaaggacgggaacaaaaagcccagcccgctcaccgccgccaggatgaagcagaaggcggtgatccagtggttgatacgttccggcgcggtgtagcgcacgatggtgtcacgtcgtttcatttgcgctcctcgtctttctcttcgtgcagattattctcttcctcatccgcatggttcggaccgacacccacgtagtggaagatactggctgcgaaggtagccgcaaagccaacagctgcgancggtttccagatgcctttccagaatttcacggtttcgctgatttccgggttctccggcaagccatgatacagatttggcttgtcagcatggtgcagcacgtacataacgtgtgtaccaccgacgcctgccggatcgtacaggcccgcattgtcgtaaccgcgggttttcagctccgccacgcgctcgctcgccagcgttttcatcgactctttcgtaccgaagtgaatcgcgcccgttgggcaggtcttcacgcaggctggttcttgcccaaccaccacgcggtcaacgcacagcgtacatttgtagacgcggttgtcttccgggttgaggcgcggaatgtcgaacggacagcccgcaatgcaataaccgcagccaatgcactgctcggactggaagtcgacgataccgttggcatactgaataattgcaccttccgccgggcacgctttcagacagcctggatcggaacagtgcatacagccgtctttgcggatcagccattccagtttgtcgttctgctccacttccgagaagcgcatcaccgtccacgatttggcgcttaaatcattggggttgtcgtacaccccaatgttattgccgacggtatcgcgaatgtcgttccactctgaacacgccacctgacaggctttacagccgatacaggtggtgacgtcgatgagtttcgccacttcttcctggaagtcccgcgcctgaggcgcgggggtcagaccgttagtcgcggaacgacgaatgatatcttgagattgataagccatatgtcgtctccgttacaccttttccacattcacaaggaaggacttaaactccggcgtctgcgtgttcgcatcaccgacgaatggcgtcaacgtattggcaataaagccttttttcgcaacaccttcatagccccagtgaataggaataccgatggtatcgatatctttgccgttcgctttcagcgtgcgaatacgtttggtcaccaccgctttggctttgatatagccacggttggaggagactttcacggtatcgccctgggcaatgccaagtttattcgccagcgactccccgatttccacaaactgctctggttgcaaaatcgcgttcaacagcgcgtgtttggtccagtagtggaagtgctcggtcagacgataggtggttccgacatacgggaacttatcggctttacccaatgcttcggcgtcgtctttaaagatacgtgcagccgggttcgagataacgtttggatgcagcgggttagttcccagcggcgtttcaaacggctcgtagtgttccgggaacggaccttccgccatcttatcgagggcaaacagacgccccatgccttcctgctgcatgataaacggcccgacgccgctacccggaggcgctgcgctgtagtccggaatatcccagccggtccacttagtgccgtcccatttcagcaactgacgcttcggatcccacgggttaccctgcggatctgcggaggcgcggttatacagaatgcggcggttaagcggccatgcccatgcccaacccagcgtgttaccgaggccagacggatcggcgttatcacggcgtgccatctggttgccttccggcgtccagctaccggcgaaaatccagcaaccacaggaagttgtaccgtcatcgcgcagttgggcaaacgagctaagttgttggcctttcttgacgataaccgcaccggttgccggatcggtaatatcggccagcgccttaccgttgctctccatcgctacttcttccgacttcggctcatgcggaatggcgtagttccaggtcatgttcagcacctggtccgggttcgcgccaccctgttcggcatacatcttgcgcaagcgcaggaagataccggagaggatctcgccatcagtcagcgcaatccccggggcgtccgcacctttccagtgccactgcaaccagcgacctgagttaacgattgaaccgttctcttctgcgaagcaggtcgatggcagacggaacacttcggtctggatcttcgacgagtcaacttcgttcagctcaccgtggttctgccagaagttagaggtttcagtgttcagcgggtcgatggtgacgaggaacttcagtttcgacagacaactgatcactttgtttttgttcgggaatgaggcaacagggttaaagccctggcagatatagccattgaccttgccttctttcatcatctcgaagtattgcaggacgtcgtagcctttatcccacttcggcaaccagtcaaagccccagctattttctgccgtcgctttatcaccaaagaaggccttcatcatagagacgaagaatttcgggtagttgccccagtagtttacctggccttccagcagcggttttggcgtgttggcggtaaggtaggtttgcagatcggtctgcttctcgcttggcagcgtcatgtaacctggcaggctctgcgacagcagccccaggtccgtcagcccctgaatattggagtgaccgcgcagggcgttaacgccgccgccagccatccccatgttaccgagcagcagctggatcatcgccatcgtacgaatgttttgcgcaccaacggagtgttgcgtccagccgagggcatacaggaacgaggcagttttatcgtgagcactggtttctgcgatgtattcgcagactttcangaacgcgtcttttggcgtaccacagatgttttcaaccacatctggcgtgtagcgggaaacgtgctgtttcagcaagttccacacgcagcgcggatgttgcagcgtggtatcgcgtttggcgaagccgttttcgtccagttcataagtccaggaggatttatcgtacttgcgtttttccgcgtcgtagccggtgaacaggccatcttcaaagccgtaatcctcacgcacgatcaggctggcgttggtataggcttcagtgtattcgcggttgaatttttcattgttcagcaggtacagcaatacgcctgacaggaaagcaatgtcagtaccggaacgaataggggcatagtagtcagccaccgcagccgtacgcgtaaagcgaggatcgatcacaatcagcttcgcgccattgtgaattttggcttccatcgcccagcggaacccgaccgggtgagcttcagcggcgttaccgcccatcaccacgacgaggttggcgttcttgatgtcgacccagtggttggtcatcgcaccgcgaccaaatgttggagcaagacttgctaccgttggtccgtgtcagacacgcgcctggttgtcgaccgcgagcatacccagcgcgcgggagaatttttgcgttaaatagccggtttcgttactcgacgcggaagcacacagcatcccggtggagagccagcggttaacagtcacgccttcggcgttttgcgcaatgtagttagcatcgcggtcttctttcatcagtttggcgatgcgatcaaacgcctcttcccaactgatttgctgccatttatcagaacctggcgcacggtattccggaaacttcagacggctttcggagtggatgaaatccaccaggccagcgcntttcggacaaagtgcaccgcggttgaccgggtgatccggatcgccttcgatatggaagatagatgctttggcgttttttgctccgtcaccgaggctgtacatcaacagcccacagcctacggaacaataggtgcaggtattacgggtttcgcgggtgcgcagcagtttatactgccgggtttccgcgagtgctacgctgggtgcaaaacccagtgccgctgccgtggtgcctgccataccgccagcgcagatcttaaagaactgccttctgctgacctgcatggattgctccttgtttcgacattgtcacgtcccatttacattcgcttgctgcgtgtgcagggagtgggagttatttttctttgcggaagg

SEQ ID NO: 1633 - DNA, 433 bp, Escherichia coli
  Strain O55:H7
aaggtccagaattggctcaatttccctccatccaggaagggtttgtaacagaataccataatgttggtgtgtgtgttcttatctggttaagagaaagtgaaaaaaacacagcaaaaagaaatcgaaaatgtgacaaatatcacaggtgttcgtcaaattgagttatggcggcgtgatgatttacaacacccacggttagatgaggtcgcggaagaagttcccgttgcgctggtctacaacggcatttcgcatgtggtgatgatggcgtcgcccaaagaccttgagtactttgcgctcggtttttcgctttccgaggggataatagaaagtccgcgcgatatcttcggcatggatgtcgttccttcctgtaatggtcttgaagtacaaattgagctttccagccgccgctttatggggttgaaggagcgccgcc

SEQ ID NO: 1634 - DNA, 9688 bp, Escherichia coli
  Strain O55:H7
  modified_base (557)..(559): a, c, g or t
  modified_base (3946)..(3946): a, c, g or t
  modified_base (4201)..(4201): a, c, g or t
  modified_base (4945)..(4948): a, c, g or t
  modified_base (6729)..(6729): a, c, g or t
cgggacgtacgggctgtggcgtatgcggcgtggagcaacttaatgacatcggaaaaccggtgcagccgctaccgttcacccagacgtttgatctcaacaaactggatgatgcattacgtcatctcaacgattttcagccagtgggacaactgaccggttgtactcacgccgccgcctggatgttgccatctggcgaactggtcggcgggcatgaagacgtgggtcgccatgtggcgctggacaaactgttaggccgccggtcacaagaaggggaaagctggcagcaaggtgcggtactggtttccagtcgtgccagttatgaaatggtgcaaaagtcggcgatgtgcggcgtagagattttgtttgcggtgtctgccgcgaccacgcttgctgtagaagtggctgagcgctgtaatctgacactggtaggtttttgtaaaccgggtcgggcaacggtttatacccatccgcagcgtttgagcaattaattaaaataagtcctgcgatatatattaaattgcaggacttattcatttcgtgaattttattattttatnnntaaacaaaatgcgtgtagtggcgttttcttttttcatttattatgttcactctcttatctatatatttataaggcaattaaatgaaaaggaatttattatcttccgctattatagtcgccatcatggccctcggtctgacgggttgtgatgataaaaaagccgaaacagaaacgcccctgcctgccaatagtcaacctgccgcaccagctcctgaagcgaaacctactgaagctcccgttgcaaaagcagatgctaaacctgaaacacctgcgcaaccggtggtcgatgaacaagcggttttcgacgaaaaaatggatgtctatatcaagtgctacaacaagttacagatcccggtacagcgcagtctggcgcgttatgctgactggctgaaagattttaaacaggggcctaccggtaaagagagtactgtttatggcatctacggcattagtgaatccaacctcgctgagtgtgaaaaaggcgtaaaaagtgctgtggcgttaacgcctgcgctgcaaccaattgatggcgtggcggtgagttatatcgatgctgccgtggcgttgggtaataccattaacgaaatggataaatattacacccaggaaaattataaagacgatgcgtttgcgaaagggaaaacgctgcaccagacattcttaaaaaatctggaagcctttgaacctgtagcagaatcttatcatgcggcgattcaggaaattaatgataagcgccagcttgcggaactgaaaaatattgaagaaagagaagggaaaacattccactactattctctggcagtcatgatttcagcgaaacaaattaataacctgatatcgcaagagaagtttgatgttgatgcggcaatgaagaaagtgtctgaactggaaacgctggtggcgcaggccaaagaagcggataaaggcggcatgaatttctcgttcattaattcggcagaccagtatcaactcgagactaaaaaatatgttcgccgcgtcagagataaagtcccgtactctgactgggataaagagcatcttcaggatgcaaacacaagctggatggtcgaagactcatttccacgagcgttacgcgagtacaacgaaatggttgatgactataatagcctgcgttaaacgtttttgatgataaatgcagtgtcggatgcggcgcatccgacacagttcaccccttgtgaagtaactccataaatgcctcatatcctgttaacccggcaataacttctgccggatgctgacacaatacgcttgccagatagctaaatatttttagctcatgacgcgcatcggcggcggcgcaggcgatcaagacatggttaatgacttcgttattcacctcaactggttgggcgagggtaataaaaaatccacgaaaacgtcgctcctgttcgctccagcaatgtgggatggcgaggcgattaacaatcaggttttcaccttcgccttcgcgggcgatgatccgttgcgcttcatcggcggtaatatggtgttgtgcgactaattgcgcacaaatttgccgggtaatatgttgccagctttcaccgcgtacattcgaataatgaaaacttccgggggcagagaaaaaacgctccggttgctggcgaataaatgccgtcgccagaaaatgttttatttgttcgataccggcagccgtaatgatattttttacggtgatgtaattatttaccgcgtcatccagtaaataatggctgttgttaatgatcaataacggctcaatctcttcgcgaatggcaacaagttcgcttaagctacgggcaataatcacccgacaatgtaaaacatcgcgctcaatggcgagctgattaatagtggcaatcgcgttctggtccgagagcaaaatgatcggctggcgttcgttttgatgtcgttccagcgcacaggcaaaatacaaaccgatcagatcgctgtcgaaaaggggaatatcgagctgttcacgcagtagcgtaataaagtgcagactcatatcaaaggccgcaggccaggcggctttcaggttattcatgctgctttggcgatgctcagcaatccacactggtgcggcaaggcaacgtaataaatgaccggtaatgttctcaaccagctgcgtatcaataatattcaatgacgcgagacctggcaccctttgcagcaaccccagcacatgatcggcagaaattacctgcgcttgctgatgctgtttctctatcaaacctgtcagggttcttacagcgttatcaccaagaaacagaccgctatgttcaacgatttgttttatctcgtcaccgggatattgcggccactcatcggtcagttgattacgcagggcgtaaatcgccagaatcaggctggagagataatccccctgcatgagcggccagcggtgttggttgtcgcaggccgtggataaatgctgaaggttgtctcgtgttacgccagccaaaggtattaaaaacggatctttgcgtagcaagttcgccagcaagataacgcgtttctcttctgtttcatcaatgaaatggcccaaaccgggacgactggccaggcaacaagtgcgttcataacgctgttttaaccggggcagacgctctgcgacccaagtttctggcaaattaagcgccgaggcgagttgcgcacggggagtaaaggtattcagtaataacagcgccagcagccgatcgtcgttatcgtgcttttgcagcaactgaaaaaagctgcggcgctcgaagatttccaactgatagcccgcactgccactggcagagatacgagctttgccgttaagggtaaagttgagatagtcaatatcacgcaggatggtcctgcctgaaacgccagtctgttgcgccagctcgccaggcgtgcgcggctgttgctccagcagatcgacaatctttaactggcgttcgtttagcattaatccacctgacggaactggctaaacgcgttgactttctccgcagttaaggtcgtcagaaaatcccgtatcagcgtgagcagagcatcataatcggcttttgaaatcataccgctgttagcgtgcagataacgagttggcagacacagcgcgacaaccggacgccctccgcccattacgttgtagcgcccgccatccgtcgctccggttttcatggtggaaaattgcagcggtaaaccgttatgtgcggcacagttttttaacgccgccaccagtttctggttgggtaagtagcgcttgtcaaacagcatcagccccggcccgttgcccagtttcagcgggtatttaatgttatcaatgcccggaacatcgcccgcgacggcggtatccagcacgatcaccacatccggtttagtgtgttcagccgaggtttgtgccccgcgtagcccaanttcttcttccacgctgccgacgccgtacagcgtaattcctgggttatttactgtctgtagtagctcagccatcatcgcgcagccgatgcgattatccagcgccttgccgactattttatcttcgccccagcaggcaaaattggcttccgggctaataaaatcgccaatttccgcaccgcgttttttcgcttcttcgcgactgttcgcgccaatatcaatgaacatctcatcaaatgacagcggttgttgcttttncttttccgttaacgcatgaggcgctacggaaccaatcacaccagggattttcactcccttgtgtgtgcgtattgttacccggtggttgagcatcgactgattccaccagccgccaatggtggtaaagcgcagaaaaccgctctcgtcgatgtgggtgaccataaagccgacttcatccatatgcccgacaacggcaacttttggacctttatttcccttacgggcaacaaagctgcccagaccatcaaaggcgatctcattaacgcaaggttccagcgtgtttatcagaatgtcgcgaacttcctgttcatcgcctctgacggcgctggcttcgcacaactgttgcagtaactcaatgttcatggacaagctcctgttgcgcggctttcgctttgcggcgtaaccacaatcctttcaggacgataatgaatgaaatgttcagcgcgaggccaatcgccagcaccagataaaacgaacctaccggcgacatcaggccgatcagcgggtcaaagatacccaaaccaggtgccagacgtttgattccgaaagcgatcaccagcacgccggtaatgccgcccgccagcgtattggcggtaatcatcggcaacggagccgccagagcgtaaggaatagccggttcggttgcgactgtggcaccgaccacaatggcactactggcagcctctttttcctgtcgggtaaacagtttgggcgcaatgaacgtcgcaagacccgccgcgacgnnnncaacgccgacgatggcgtaccagtcataaatgtgtttttccagcagtgagaagcagaagaaccaggcggttttattgatggggccgcccatatcgaacgccagcatcgcaccgaccagaaacgctgccgcaaacttcattgatggaggaatggtattcaggaagtgcagtagcccgcccatgaggtcggacatcaccggcccgataacgtagtaagtgagcacgccaaaaaccagcagagtaacgaatgggataagcatggagccgagcagcggttgtaatgctttgccaagacggactttacggaaccagaagacgaaatagccaatcgccagccccagcaccaccgcgccgaggaatcccgcacccgactgggtgccgagcagcgctttgtcgttcgccagatagcaaaccagaaacgccggagcgaaagccggtttatcggcaatcgacgaggcaatataagcgcccatgatggggatcataaaggtgaagccaaggtaaccgatggattcaactacccaggtaaacgacggcgcgcctttcgacatatcggtatacggcaaaccgaactgcaccagcatgttggcaagcgccaccaggataccaccgccgatgacaaacggcagcgccgcagagacgcccgccatcaggtggctcatcacgctgccgctttgtacttcctgtttgcctagcttcacgccgctatctgcggcaaaaagctgcgaatttgtcggtaattcactgaaaatctgatcgatatttttcagcgcctgggagatggcaatctcataaacttttttcccggcaaaccgtgcgcgatcgtcaccgctcaggccacgcccggtggcgagaatcacgtaatcggcagcggcaatctcttcgctggataagcggttttcaacgccgctggacccttgagtttccactttaatggtatggccgagagaacgggctttctgttccagggcttccgccaccatgtaggtgtgagcgatcccggcggggcagttggtgatcgcgacaatacgtaaggatgactccatcgccacttccttatgagctgagggtttgatttaacaaggcaagcacctggtcggtatcgccctgttgcagttgatgaataaattcctggtgaataattttgcgacacagtgtgccgatgattttgacctgatcctcttcgccactttgcggtacgccgaggcagatccagcaattgacgtcttcgccgtcgctggctttccagtcaatagcctgcgctttgcgggcgaataacacgaacggttgtttaacgcaggcgcttttaccgtgyggcacggcgacaccagaaccaaaaccggtggagtgcattttttcgcgcagcagcagggtttgcaggaactggtgtgagtcggtgataaaaccgttttgtaacgccattgtcgccaactgcttcagaacggaataagcgccattgccctgaatattcaggtcaatacagcttgcagtaagagctgccattaatcggactccatgaaaaaatatttcagttaattgtaatagcggggcgggtttgtgatgagcgcggatatgtcgtgaagtcgtgacaatataaagcagagtgaaggataaattttgcggcgtaaggcacatattagtaggtaaaataaatcttgtgaataaagagttattatttaatgattttgtgaatgtttaaatgtctcagataatttgtctaaacgttatttatatttgtggcttatgagccagcttgaatcatatctaatattttttacgatntttagttaaaaacggcactattgttatattcctcacgttccaggaaatcagcggatttactcatattatgcggcgggatactatccatcggcctgctgaagttggattaaaaattcgaaagtgcacaccttatatttctctatatacgtattccttttggaaagcgtagggtctcctttatttcagggaacgtaaataatgaaaaaatcgacattatctttagccatcggtttattattggcatgtagtaccggtatggcaaaaacacagcatttaacgctggaacaacgcatggcattgctggaagaacgcctggaagcggcagaaatgcgggcggcaaaagcagagagccaggttaaacagctgcagacacaacaagccgctgagatccgcgaaattaaggccgctcagggcaatacgccggtaaatggacaggcaacggcggaatctgcaaagaaaaatgccacctcacctaatcttttgctttcaggttatggcgatttaaaaatctacggcgacgtagaatttaatatggatgcggaaagtaatcatggcctgctggcaatgaccaacgctgatgtgaatagcgatcccactaatgaacagtggaatctcaatggtcgtattctgttaggttttgacggtatgcgaaagatggacaacggttatttcgccgggttctccgcacaaccgctgggtgatatgcacggttcagtaaatatcgatgatgcggtattcttctttggcaaagaaaacgactggaaggtcaaagtaggccgttttgaagcctacgatatgttcccattgaatcaggatacctttgttgaacattccggtaatactgcgaacgatctttatgacgatggcagcggttatatctatatgatgaaagagggccgcgggcgctctaacgctggcggtaatttcctcgtcagcaaacaactcgataactggtattttgaattaaacacgttacttgaagacggaacatctttatataatgacggtaattatcatggacgcgatatggagcagcagaaaaatgttgcttatctgcgcccagtaattgcctggtcgccgacggaagaattcaccgtttccgcagcgatggaagcgaacgtggtaaataatgcttatggttataccgatagcaagggtaattttgtcgatcagtccgatcgtaccggctatggtatgagcatgacctggaacggcctgaaaacggatccggacaatggcattgtggttaatctaaataccgcctatttagatgctaataatgagaaagatttcactgccgggattaacgcgctgtggaaacgtttcgagctcggttatatctacgcgcacaataagattgatgaattcagcggtgtagtttgtgataacgactgctggattgatgatgaagggacgtacaccattcacaccattcatgcgtcttatcagttcgctaacgtgatggatatggagaactttaatatttacctcgggacgtattactccattctggatagcgacggcgataaaaaacacggtgatgatactgatgaccgttacggcgcacgcgttcgctttaaatacttcttctgatgaagtcgcggtgctggatattttccggcaccgcaactcattaaggcaggtaaaacacttcttgcagctcgttactcaccgggctgttatccgggttagcgggcataacatcggtcatatatttccaccaacgttggcagatttcagtgctggctaccgcattccaccgttcttcagattcaatctttaccgtggcaaacagcagattacgcgctttgtcgaggtaaatggcgtagttatgcgcaccgtgagatttcaacactgcttccagttccggccagatgggattatgccgacgctgatactcttcgtgggcgtcggggtttacctgcatgacaaaggctttgcggatcatgtttgctccttacagcgccagcgcactggcgagtggtgtaacgccgaaacgctggccgagcgctatcaactcttcacggctgatagtctgtttcatgccgcccatcgaatacaccttcactaacacttccgctgatttttctgcggtgtcgattaaaccgaaggtttcatccagcgtcggtccggaaccgaacacaccgtggaagggccacaacaccagcgaatgtttttgcatctcttgggcagttgcctggccgatttcgtccgtgccgggtaccatccacggcagaatgccaacgccatccgggaataccaccagacactcggtgctgccttcccacagttggcgagtgaagaccgcggtgtcgttttcaagtacataggtgagggcgatcaggttggtggcgtggcagtgcatgatcacccgatctttaccgttggtggctttaatgcgctcgcagtgggagagaaagtgagccggaagttcagaagttggaacggcttcgttggttaacccccagagaatatggtagcccgcgccatcgctgtcgacttttacgacgcctaagttagctgcaggatcgagctggacgttacggaagaatttgccggagccggtgacaataaacggcgtatttgccagtaaaggcatgggttggctgagcggaatatagcgcggttgtgggtggaagttgtcgtgataaagcgcgatatcggcgtcatcctggcgcagcgtcaggttgccgccgttgcgctcgtcccagcctttcagccaggcatcggtggtggctttgatcattccctggacaaaccaggactgggtaatgttttgcatgttctgtgttcctgtaaattcggtgttgtcagatgcacgacccgtaggccggataaggcgctcgtgccgcatccggcaatcaatgcctgatgcgacgctgtcgcgtcttatcaggcctacaactattgccggcctgtaggccggataaggcacttgtgccgcatccggcaatcaatg

SEQ ID NO: 1635 - DNA, 60 bp, Escherichia coli
  Strain O55:H7
gcgacgctgtcgcgtcttatcagacctacaactattgccgacctgtaggccggataaggc

SEQ ID NO: 1636 - DNA, 34219 bp, Escherichia coli
  Strain O55:H7
  modified_base (424)..(425): a, c, g or t
  modified_base (968)..(968): a, c, g or t
  modified_base (1879)..(1879): a, c, g or t
  modified_base (9612)..(9612): a, c, g or t
  modified_base (11991)..(11991): a, c, g or t
  modified_base (14846)..(14847): a, c, g or t
  modified_base (15126)..(15126): a, c, g or t
  modified_base (15656)..(15656): a, c, g or t
  modified_base (15661)..(15661): a, c, g or t
  modified_base (16508)..(16508): a, c, g or t
  modified_base (16592)..(16592): a, c, g or t
  modified_base (16961)..(16964): a, c, g or t
  modified_base (16966)..(16967): a, c, g or t
  modified_base (17137)..(17137): a, c, g or t
  modified_base (17160)..(17160): a, c, g or t
  modified_base (20575)..(20575): a, c, g or t
  modified_base (20578)..(20578): a, c, g or t
  modified_base (20926)..(20927): a, c, g or t
  modified_base (23640)..(23640): a, c, g or t
  modified_base (26865)..(26865): a, c, g or t
  modified_base (29739)..(29742): a, c, g or t
  modified_base (32675)..(32675): a, c, g or t
ttatcaggcctacaactattgccgacctgtaggccggataaggcgctcgtgccgcatccggcaatcaatgcctgatgcgacgctgtcgcgtcttatcaggcctacaactgttgccgacctgtaggccggataaggcacttgtgccgcatccggcagtgtttacccgcggcgactcaaagtttctttctcatatgcccgcacgctctccagccattcgctacctgctggcgtatcgtgacgttggcaatacatttcccagaccgcctgccacggcaacgatttctgctcttccagcagtgccagacgcgcagtgtaatcgcccgccgcttccagcttgcgcagctcagcggtaggttccagcaacgcacgcagcagggcttttttcatattgcgtgtaccaatgatccacgcagcaatacggttnngatagaggcatcaaagaagtcgaggccgatatgcacccggtcaaacagatcgtgacgaacaatctcactggcaatcgcctgggtttcatcatccagcagcactacgtgatcgctgtcccagcgaaccggacggctgacgtgcagcagcaactgcggcacatacagcatggcggcggaaatcttgtcggaaatcacttcagtcgggtggaaatgcccggcgtccaggcacagcgcagtctggcggctggtggcataccccatgtaaaactcattggagccaaccgtgtagctctctgcgccaatgccaaacaatttgctctcaacggcgtcgatatggtgcgccggatccagcttctcgctgatcacctcatccagagctgccagcagacgctggcgcggagcgagacggtcaacggtgatatctttcatgccatccgggatccagatgttcatcaccgacggtgtgccgagttgctcaccaaaataggccgaaacgcggcggctggccttgcagtgatcaatccagaactggcgaatgctgtngtcggcatgggaaagcgtaaagccatcggcgcttagcggatgcgagaaacaggaggggttaaaatccagaccgagctgattggctttcgcccattcaacccagtttttgaagtgctcaggtttgatctggtcgcgcgagactggcgtgtctgattccagatagatggcatgtaaattaagccgttttggccccggaatcagccgcatagcctgttccagatcggcacgtagctcactggcattacgcgctttgcccggataattgccagtagcctgaatccctccggtcagcgaaccttccgggttttcaaaaccggaaacatcatcaccctgccagcagtgcattgaaacgggtaaacgatcaagttggcgcagcgcctcctcgacatcaatccctactgccgcgaaacgctgtttcgccagctcccaggcctgttccagttgagtggtcatgcgcaaagctcctttgtctgtcgtgtagagtgaatccgcgccacatagtgggcaatttcactgtcaggattaggggtaaaggtggtcagattcgcggtggtgctgacgacctgacggaaatcatccacattgttgagttcatccagcgtcattaactggatgccgatattgccgagcgtcgaggcttcaacaggcccggcgatcacccgaataccgcaggcatcggcgcatagctggttgagcagcgtgttctggcagcctccgccgacaatatgcagttgcgagaaatcttcaccgcgcagctgcgccagctcatgcaacacatcggcatacagcagcgccagactgtcgaaaatgcagcgcgccagttcagcatcactttccgggatcggttgcgccgtttcccgacacgcagcctgaatttcgctgcacatcgtctcaggattaataaagcgatngtcattgggattgataatgaagcggcaagccggaagtgcctgtgtcgcggagataagcgccggaagatcgttgatttgccgctcctgaagcactcgctgaagcagccataagcccataatatttttcagcacccgatagcgaccttccgccccgccttcattggtgatgttggctgccagtgccgtgtcattggtaaatggcgtctggctttcgaagcccatcaatgaccaggtgccagaagagagataagcagcacgtgaaccgtttaacggcgaggcgataaccgcgctggcggtatcatggctggcaacggcgaccactggaatctcattaccctgcgggcaaatccagtgacctatgacattacccggatgcgtcgggcgaccaaaccaggctttgttggccccgctccacgccagtagcgactcgtcccagtcgtcgctattgatattgaccagttgcgtggtcgtggcgttggtatattcccagttcatcttgccggtcaggcgataactgaagtaatccggcatcagcagagcgtgagcaatgtgtggaataagttcaggttgttgctccgtcagcgcacgcaactgataaagcgtattgaagggcagaaactggatgccgctacgttgataaatatcgcgtttgccgagttgttgttgtgcctgcgccattaggccattggtgcggctatcgcgataagcaacgggcaggcccacacgctgaccctgttggtcgagcagcacaaagtccacgccccaggtatcaatcccaatgctatcgatacgaatcccttcctcgcacaccttgtttaatccaaggcgaatggcactttcaaggctatccacatcccaggtgacatagccgttctgactatgcagcccattgttaaaacgatggatttcgcgcagcgtcaggctgcggcattcacgctcgtaacgcgccagcatcacgcgcccactggatgcgccgagatcgacggcgacacaattgcgaaaggtcataatgtgatcctgctgaatttcattacgaccagtctaaaaagcgcctgaattcgcgaccttctcgttactgacaggaaaatgggccattggcaaccagggaaagatgaacgtgatgatgttcacaatttgctgaattgtggtgatgtgatgctcaccgcatttcctgaaaattcacgctgtatcttgaaaaatcgacgttttttacgtggttttccgtcgaaaatttaaggtaagaacctgacctcgtgattactatttcgccgtgttgacgacatcaggaggccagtatgaccgtattacatagtgtggatttttttccgtctggtaacgcgtccgtggcgatagaaccccggctcccgcaggcggattttcctgaacatcatcatgattttcatgaaattgtgattgtcgaacatggcacgggtattcatgtgtttaatgggcagccctataccatcaccggtggcacggtctgttttgtgcgcgaccatgatcggcatctgtatgaacataccgataatctgtgtctgactaatgtgctgtatcgctcgccggatcgatttcagtttctcgccgggctgaatcagttgctgccacaagagctggatgggcagtatccgtctcactggcgcgttaaccacagcgtattgcagcaggtgcgacagctggttgcacagatggaacagcaggaaggggaaaatgatttaccctcgaccgccagtcgcgagatcttgtttatgcaattactgctcttgctgcgtaaaagcagtttgcaggagaacctggaaaacagcgcatcacgtctcaacttgcttctggcctggctggaggaccattttgccgatgaggtgaattgggatgccgtggcggatcaattttctctttcactgcgtacgctacatcggcagcttaagcagcaaacgggactgacgcctcagcgatacctgaatcgcctgcgactgatgaaagcccgacatctgctacgtcacagcgaggccagcgttactgacatcgcctatcattgcggattcagcgacagtaaccacttttcgacgctttttcgccgagagtttaactggtcaccgcgtgatattcgtcagggacgggatggctttctgcaataacgcgaatcttctcaacgtatttgtacgccatattgcgaataatcaatttcgttctctggccgaggtagccacggtggcgcatcagttaaaacttctcaaagatgatttttttgccagcgaccagcaggcagtcgctgtggctgaccgttatccgcaagatgtctttgctgaacatacacatgatttttgtgagctggtgattgtctggcgcggtaatggtctgcatgtactcaacgatcgcccttatcgcattacccgtggcgatctcttttacattcatgctgacgataaacactcctacgcttccgttaacgatctggttttgcagaatattatttattgcccggagcggctgaagctgaatcttgactggcagggggcgattccgggatttagcgccagcgcagggcaaccacactggcgcttaggtagcatggggatggcacaggcgcggcaggttatcggtcagcttgagcatgaaagtagtcagcatgtgccgtttgctaacgaaatggcagagttgctgttcgggcagttggtgatgttgctgaatcgccatcgttacaccagtgattcgttgccgccaacatccagcgaaacgttgctggataagctgattacccggttggcggctagcctgaaaagtccctttgcgctggataaattttgtgatgaggcatcgtgcagtgagcgcgttttgcgtcagcaatttcgccagcagactggaatgaccatcaatcaatatctgcggcaggtcagagtgtgtcatgcgcaatatcttctccagcatagccgcctgttaatcagtgatatttcgaccgaatgtggctttgaagatagtaactatttttcggtggtgtttacccgggaaaccgggatgacgcccagccagtggcgtcatctcaattcgcagaaagattaattcgccatgcccatgccaacgatgttggcggcaacaataatcaccacacaaccgaggctcaacaccgttaccggacggcgtcctgcattgttccactctttcagcaccagcccgacgataccgccgcacaatacatagaaactcatatgcagcatccaactgatgtagtcatactgcgccggaatgcgggcgtggccccaggcatagaaaaagaattgcagataccacatcaacccgcccagtgctgagagtaacacattgtgaatgatcagcggttttgccagcgagaagtcggcttttagcgataaatccttcacttttgccagacgaataaaacagaaaccgaggttgatgatcgcgccgccgcccatgatgacaacatagcttggcagagcgacatacagtggatcgacgcctagtgtggcagcggcttcatgcatcggttttgcggcgttcatcgcaaaggacatcccggcagagaaaatgccgcacatcaccgccagcaccagtccttttttcagattgaactcttcggctttaatgcccatcttgcgctctttcaactgcccggctcgagttacaatccctacgccaatcagcgccaccagaacgccgagcaacgtcatgcgtccgccttcggtgttaatcaacacatcgaaattgccgttgataattggcgtcatcagcgtaccgacaatcaacgtaatgccaatggcgatgccaattcccatcgacatgccgagataacgcatggtcaggccgtagttgatattaccgatcccccacatagcgccgaacagaaaaacaggcagcagcgtagagagactaaacgagctgtaatacgcccagaaattcggtagtaacagggcgctgatggcctacggcagaataatccacgaaacaatcccaccgactgaccacatggtttcccatgaccatttttttacttttttgaacggagcgtaaaaacaggctgcactggccgcgccgatcaaatgccaaaatatccccatcgtaatcgcgttactcatcttcttatcctcatcatttttcgtcgcgtcacatctccgacgagatgagtgtaaaaatcgtgctgtcgattaacctttcgcctgttgccgccgttgtcgatttactggcaatcacggcattaagtgggtgatttgcttcacatctcgggcattttcctgcaaaaccatacccttacgaaaagtacggcattgataatcattttcaatatcatttaattaactataatgaaccaactgcttacgcggcattaacaatcggccgcccgacaatactggagatgaatatgagctataccctgccatccctgccgtatgcttacgatgccctggaaccgcacttcgataagcagaccatggaaatccaccacaccaaacaccatcagacctacgtcaacaacgccaacgcggcgttggaaagcctgccagaatttgccaacctgccggttgaagagttgatcaccaaactggaccagctgccagcagacaagaaaaccgtactgcgcaacaacgctggcggtcacgctaaccacagcctgttctggaaaggtctgaaaaaaggcaccaccctgcagggtgacctgaaagcggctatcgaacgtgatttcggttccgtagataacttcaaagcagaatttgagaaagcggcagcttcccgctttggttccggctgggcatggctggtgctgaaaggcgataaactggcggtggtttctactgctaaccaggactccccgctgatgggtgaagctatttctggcgcatccggcttcccgattctgggcctggatgtgtgggaacatgcttactacctgaaattccagaaccgccgcccggactacatcaaagagttctggaacgtggtgaactgggacgaagcagcggcacgtttcgcggcgaaaaaataatcatttgccgtctgctgcagtgaggcgtttacgccgcatatcagcttaaaaaatgaaccatcgccaatggcggtggtttttttgtgatcaatttcaaaataaaaacaatgatccgataaaaataaaacagcgtttcagttgatgtggttttgatcacttttattgattaaatgaatgtctatcttcgtttccatcaacactgatgctccattgaggaattacgcatcagcccttaaaaatatgccgacaggtgatggaaatgcagataaaacgcttgattgagaaaatcccgggggggatgatgctcgtcccgctattccttggcgcactgtgccacaccttctcgccgggggcggggaaatattttggatcattcaccaacgggatgattaccggtacggtgcccattctggcggtgtggtttttttgcatgggggcgtcaataaaattaagcgcgacgggaacggtactgcgtaaatccggtacgctggtggtaactaaaattgccgtcgcgtgggtggttgcggcaattgcctcgcgcattattccggaacatggtgttgaagttggattctttgccggactttcaacgctggcgctggtggcggcgatggatatgaccaacggcggactttacgcttccatcatgcagcagtacggcacaaaagaagaagctggggcatttgtgttgatgtcgttggagtccgggccgctcatgacgatgattattctgggcactgccgggattgcctcgtttgaaccgcatgttttcgtcggcgcagtattaccgttcctggtgggctttgcccttgggaaccttgaccctgaattacgagaatttttcagcaaagcggtgcagacgctgattccattctttgccttcgcactaggcaataccattgatttgactgtaattgcccagacaggtttgctggggatcctgttgggtgtggcagtaattatcgtgaccggtattccgttgattatcgccgataaattgattggcggtggcgatggcactgccggaattgccgcttccagttccgcaggggccgcggtagcgacacctgtgctgattgcagaaatggtgcctgcgtttaaaccgatggctccggcagcaacttcgctggtagcgacggcagtcattgtgacttcgattctggtgccaattcttacctctatctggtcacgtaaagtcaaagccagagcggcgaaaatcgaaattttaggtacggtgaaataaacctgcttccttaatccccacagccggatgaactaacgttcgtccggtttgctattgagttcctgcctggatacttaccgcgaaaacagcacgcctgacataaaataaatatggtctaatggggaaatttctcgtggagagggaacagatgcgatatccggttgatgtatacacaggcaagattcaggcttatcccgaaggcaaacccagcgcaattgccaaaatccaggttgatggtgagttgatgctgacggagctggggctggaaggtgacgagcaggcggagaaaaaggttcacggcggaccagacagagcgctgtgtcattatcctcgtgagcattatctctactgggcgcgggaatttccggaacaggcggagttgtttgttgcgcctgcgtttggcgaaaatctctcaaccgacggtctcacggaaagtaatgtttatattggcgatattttccgctggggagaggcattaattcaggtcagccagccgcgctcgccttgctataaactcaattaccattttgatatcagcgatatagcgcagttgatgcaaaacacgggtaaagtgggatggttgtatagcgtgatagcgccagggaaagtgtctgcggacgcgccgctggagttggtttcccgtgtcagcgatgtgaccgtgcaggaggctgctgccatcgcatggcatatgccgtttgatgacgatcagtatcaccgtttactctccgctgccgggttatcgaaaagctggacgcgaacgatgcaaaagcgccgactgagcggcaagatcgaagatttttcccgccggttgtggggaaaataacccccggagtgtaggcctgataagacgctatcagcgtcgcatcaggcatcctgctcaaatgccggatgcggcgtaaacgccttatcctgcctacaaatgcggagtttaactccgcttatacagcggcaaccaaatcaccagccgtaaaccgcccagcgggctgtcttctgctttcacccagccacgatgctgctgaatggcggtttcaacaatcgccagtcccaaacctgtaccgccagattcacgatcgcgcgcttcatcggtccgatagaacggacggaaaatctgttcgcgatcttccgggctaacgccaggaccatcgtcgtccaccgtaatggtgataccgtctttatctaccgcaaagcccacttcaatcttcgtatgggaataacgcagggcattacgaacaatgttttccagcgcactctccagggcgttcgggttgccgtacagcggccacggcccaggcgggaagttaactgtcaacgacttgcccatttgctcggcttcgaacgccgcgttatccagcacttcactccacaactgattggctttgatggtctcgctaaccagcgcgtttttttgctgattacgtgacatcaccaacaggtcgttaatcatgctgtccagacgttgcgcttcggtttcaatacgctccagttccttgctttcaccantacgacggcgcagtaacgccgtacccagttgcagacgcgtcagcggggtgcgcagctcgtgagagatatcagaaagcagacgctgctgagaggtcatcatgcgctccagcgcggtgaccatctggttaaaactggcacctgcggcaaggaattcctgtggccccgcttccagttccgggtgctggcgtaagtttccctgggcaacttcatcggcagcgtttttcagcttacgcgccggttttgccagactccaggccaaccacaacagcagcggcgtactgaccaacatggtgacaatcagcagtaatagcgggcggtcaaacagtaagttaatgaaatcggattgagaactgctggccggacgaatcagataaagttggtaattatcttcgccatcacgcacggagaacggaccgaccagttccacgcggccatactttttcttctgcggatgatcggcgttatcggcctgaccaataaagttacgaatgatctgcatttcgctgcgttcagcgccgatcacgcggccttcggtggtcaccaataacaaacgctgtcctggcggtgcccacttatcaatcgcccggaacagacgccgccaccacattaaatcgttgggcggatcgttcgccagctccgcttcaacatgctgctcaatcatcagaccctgacgctgttcgctatccagaagctcggtcatctggcgtgaatcgagcttgggtaacatcaaaaccaacatcaacaccagcgccagcgtcagccagaagatggcgaagatgcgcgcggttaagctgcctatcatgaagcagaaaccatcaggtagccgcgaccacgcaaggttttaaaccacgggtgaccatctttacgatccggcagtttacgacgcaggttggaaatgtgcatatcgatagcgcggtcgaaaggcgtcaggcgtttgcccagcacttcctggcttaaatgttcacgggaaaccacctgacccagatgctgtgccagcaaatagagcagggtaaactcagtaccggttaactccagcgtttgcccgtcgaagctggcttcctgacggcctggattcagtactaaggcatcaacttccagtgtcggtgaaccgttgtcgttgttttgctgttgctcgctccagtgcgaacggcgcaggatcgcgcgaatacgtgccaccagctcacgatcattaaacggtttcgggagatagtcatctgcgcccagctcaaggccgagaacgcgatcaagttcactgccgcgcgccgtcaacataatgacaggcgtctggtgtgtctggcgaagtgcttttaatgtgtcgataccatttttcttcggcatcattacgtcaagcaaaagtaaatcaatgctgtcgtccagaagatcaagcgcctgttccccatcgtgggcaacaatcacgttgaagccttccatctcgagcagctcctttaatagggaagtcagctctcggtcatcatcaactaacaggattttattcattgtttaaatacctccgaggcagaaattacgtcatcagacgtcgctaatccatgactttacgttgttttacaccccctgacgcatgtttgcagcctgaatcgtaaactctctatcgttgaatcgcgacagaaagattttgggagcaaatgatgcgcatagttaccgctgccgtcatggcctcaacgctggcagtcagttcattaagccacgctgctgaagtcggttcaggcgataactggcatccgggtgaagaacttacgcagcgcagtacgcagagccatatgttcgacggcataagtttaaccgaacatcagcgtcagcagatgcgagatcttatgcaacaggcccggcacgaacagcctcctgttaatgttagcgaactggagacaatgcatcgccttgtcaccgcagaaaattttgatgaaaacgctgtgcgcgcacaggcagaaaaaatggcgaatgagcaaattgctcgtcaggttgagatggcaaaagtccgcaaccaaatgtatcgcctgttaacgccggagcagcaagcggttttaaacgagaaacatcaacaacgaatggagcagttgcgtgacgtgacgcaatggcaaaaaagttcatcgttgaagctattgagtagtagcaactcacgttcccagtagtaaaccctgttttccttgccatagacaccatccctgtcttcccccacatgatgtgggggttttttttatcctcaatttgcctgctgcttaatgcattgcagatgatttgcttccgttatactagcgtcagttgatagcgggagtatttatgaatcaatcttatggacggctggtcagtcgggcggcgattgctgcgacggcgatggcttcactgctattgctgattaaaatntttgcatggtggtataccgggtcggtgagtattctcgccgcgctggtggattcgctggtggatatcggcgcgtcgttgacgaatttattggtggtgcgatattccctgcaacctgccgacgataatcactcgtttggtcacggtaaagctgagtccctcgcggcgctggcgcaaagtatgtttatctccggttcggcactattcctgtttttgacaggcattcaacatctgatatctccaacaccgatgacagatccaggcgtcggggttatcgtgacaattgtggcgctaatttgtacgattatccttgtctcgtttcagcgttgggtggtgcgccggacgcaaagccaggcggtgcgggctgatatgctacattaccagtctgatgttatgatgaacggcgcaattctgctggcgctggggttgtcctggtacggctggcatcgcgccgatgctctgtttgcattgggaatcggcatctatattttatatagcgcgttacgcatgggatatgaggcggtacagtcattactggatcgcgcattacctgatgaggaacggcaagaaattattgatatcgtgacttcctggccgggtgttagcggcgctcacgatcttcgcacgcggcagtcagggccgacccgctttattcagattcatttggaaatggaagactctctgcctttggttcaggcacatatggtggcggatcaggtagagcaggctattttacggcgttttccgggatcggatgtgattatccatcaggacccctgttccgtcgtacccagggagggtaaacggtctatgctttcataatcagtataaaagagagccagacccgcattttgtgtataaaataccgccatttggcctgacctgaatcaattcagcaggaagtgattgttatactatttgcacattcgttggatcacttcgatgtgcaagaagacttccggcaacagattttattttgcattccaaagttcagaggtagtcatgattaagaaaatcggtgtgttgacaagcggcggtgatgcgccaggcatgaacgccgcaattcgcggggttgttcgttctgcgctgacagaaggtctggaagtaatgggcatttatgacggctatctgggtctgtatgaagaccgtatggtacagctagaccgttacagcgtttctgacatgatcaaccgtggcggtacgttcctcggttctgcgcgtttcccggaattccgcgacgagaacatccgcgccgtggctatcgaaaacctgaaaaaacgtgggatcgatgcgctggtggttatcggcggtgacggttcctacatgggtgcaatgcgtctgaccgaaatgggcttcccgtgcatcggcctgccgggcactatcgacaacgacatcaaaggcactgactacactatcggtttcttcactgcgctgagcaccgttgtagaagcgatcgaccgtctgcgtgacacctcttcttctcaccagcgtatttccgtggtggaagtgatgggccgttattgtggcgatctgacgctggctgcggccattgccggtggctgtgaattcgttgtggttccggaagttgaattcagccgtgaagacctggtaaacgaaatcaaagcgggtatcgcgaaaggtaaaaaacacgcgatcgtggcgattaccgaacatatgtgtgatgttgacgaactggcgcatttcatcgagaaagaaaccggtcgtgaaacccgcgcaactgtgctgggccacatccagcgcggtggttctccggtgccttacgaccgtattctggcttcccgtatgggcgcttacgctatcgatctgctgctggcaggttacggcggtcgttgcgtaggtatacagaacgaacagctggttcaccacgacatcatcgacgctatcgaaaacatgaagcgtccgttcaaaggcgactggctggactgcgcgaaaaaactgtactaatgatttcggaaaaaggcagattcctttagcctgaaaccgatgacagaagcaaaaatgcctgatgcgcttcgcttatcaggcctacgtgaattctacaatttattgaatttacaaacttttgtaggccggataaggcgttcgcgccgcatccggcatcgataaagcgcactttgtcagcaatatgaggcggatttcttccgcctttttaacccccaacatatacccgcaagttatagccaatctttttttattctttaatgtttggttaaccttctggcacgctttgctcatcacaacacaacataagagagtcgggcgatgaacaagtggggcgtagggttaacatttttgctggcggcaaccagcgttatggcaaaggatattcagcttcttaacgtttcatatgatccaacgcgcgaattgtacgaacagtacaacaaggcattcagcgcccactggaaacagcaaactggcgataacgtggtgattcgtcagtcacacggtggttcaggcaaacaagcaacgtcggtaatcaacggtattgaagctgatgttgtcacgctggctctggcctatgacgtggacgcgattgcggaacgcgggcggattgataaagagtggatcaaacgtctgccggataactccgcaccgtacacttccaccattgttttcctggtacgtaagggaaatccgaagcagatccatgactggaacgatctgattaaactgggtgtttcggtgatcacgcctaatccgaaaagctctggtggcgcgcgctggaactacctggcagcctggggctacgcgctgcatcacaacaacaacgatcaggcaaaagcacaggattttgttcgggcactgtataaaaacgtcgaagttctggattctggcgnncgcggctccactaacacttttgtcgagcgcggaattggcgatgtactgattgcctgggaaaacgaagctctgctggcagcgaatgaactggggaaagataaattcgaaatcgtcacgccgagtgagtctatcctcgcagagccaaccgtgtcggtggtcgataaagtggtcgagaaaaaaggtactaaagaggtggcggaagcctacctgaaatatctctactcgccagaaggtcaggaaattgccgcgaaaaactactaccgtccgcgcgacgctgangtggcgaaaaagtacgaaaatgcgtttccaaagctgaagttattcaccattgatgaagagttcggcggctggacgaaagcgcaaaaagagcattttgctaacggcggtacgttcgatcagatcagcaaacgctgatttccccaggataattatcaaacccggtggtttctcgcgaccgggttttttatttgtcacgattttgcgttacccttgcatctctttgaggtacagggaaaaaaagatgaaaaaagcgggtcttctttttttggtgatgatagttatcgccgttgtggctgccggtattggttactggaaattaaccggtgaagagtcggatacattacgtaagattgtccttgaggaatgtttgcccaatcagcagcaaaatcaaaatccttcgccatgtgcggaagtcaaacccaatgccggatacgtggttttaaaagatcttaatggcccactgcaatatctgttgatgccaacgtatcgtattaacggtactgaaagtcctttgttgaccgatccttcancgccnaacttcttttggttggcctggcaggcgcgtgattttatgagcaaaaaatacggccagccggttcccgatcgcgcggtttctttggcgatcaactcccgcaccgggcgtacgcaaaaccattttcatattcatatctcttgtattcgtcctgatgtgcgcgaacagctggataacaatctggcgaacatcagcagccgctggttgccactgccaggtggtttgcgcgggcatgaatacctggcgcgtcgggtaacggaaagcgaactggtacaacgcagcccatttatgatgctggcagaagaagtacctgaggcgcgggaacatatgggaagctacgggctggcgatggtacggcagagtgataactcatttgtattgctggcgacacaacgaaatctactgacgcttaaccgtgcttcagccgaggaaattcaggatcatcagtgtgagattttgcgttaaggcgaagagttaaggaaagtaagtgccggatatgaaatccggcacctgtcagacttaagcctgtttagccgcttctgcagctttaacgattactgcgaaagcgtcagctttcagagacgcaccgccaaccagcgcgccgtcgatgtctggctgagcaaacagttctgcagcgttagacgcgtttacagagccgccgtactgaatgatcacttgttcagcgatgttagcgtcaactttagcgatgtggtcacgaatgaatttgtgaacagcctgtgcctgagccggagttgcagatttgccagtaccgattgcccatacaggttcgtaagcgataaccgcaccttcgaatgccgcagcaccctgagttttcagtaccgcgtcgatntgacgtgcgcaaacttcttcagttttgcccgcttcgttttcagcttcggtttcaccgatgcacagaaccggagtcaggccctgntctttcagcaccgcgaattttttcgcgatcagttcgtcagattctttgtggtaagtacgacgttcagagtgaccgatgatgatgtactgtgcgccgatgtctttcagcatagcagcagaggtttcaccggtgaatgcgccggacaggttcaggtccacgttttgcgcacccagcatgatgtggctgccttcagcttcacgcttcgccatatcgatgtacatttccggtggtgcgattgcaaccgcacagccagcaacacctgccagctctttacgcaggttagaaaccagctcgtgaaccatgtggcggctgccgttcagtttccagttacccatcactaaaggatgtcgcattttaattctccacgcnnnnanncgaataaaggaagatggccgccccgcagggcagcaggtctgtgaaacagtatagagattcatcggcacaaaggctttgctttttgtcatttattcaaaccttcaagcgattcagatagcgccagcttaatcggttcaacagcgaaggtcagccccttttcgccgttgtcngcgacaacatagcgcagtgcacnttctgtctcggtgtaataacgtttgtttttccccgccgttagtagcgactgcagttttttctggctttgtgttttggtcattaatggggtgagtgtgcggatcaccgctgccatgtattcctgagctttcgctttcgcggctttttgctctggcccctggatgggtagccatgtcatttgaatgcttttgatttttaaggtaccgcgctccagcgctgtagaagcatacaagttctcgttaattttactggcagcacgagtgagattggctttgtcgggactgctgtcgatggcacgaaattcgttcagtggcaggctgggattctggctgttaaagtcttctcgaaactggctgatggagagatcgaaagtaggggctccagccagcagataaggcgcggtcgttgccgtatctggtgtttgtgcatgcgccgttgttgtaacggttaatgcagaacataagagaaaaaacagcgtacaccctggcttcattgacagtaccttttgttatgactggctccgattaaaacgatatctgtcgcccttgtcaaaagggtagaatcctggaaaagacaaccatcaaggaacttacatgaccatacagcaatggttattctcatttaaagggcgtattggacgccgtgatttctggatttggataggcctgtggttcgcaggcatgctggtgcttttctcactggcgggtaaaaatttactcgatattcagaccgcggcgttttgccttgtgtgcttgctctggccaacagcggcagtaaccgttaagcgcttgcatgatcgcgggcgttccggcgcatgggcatttctgatgattgtggcgtggatgctactggcgggtaactgggcgattttaccgggtgtctggcaatgggcggtagggcgttttgtcccgacgttgattctggtgatgatgcttatcgatcttggtgcgtttgttggcacacaaggcgaaaataaatatggtaaagatactcaggatgtgaagtataaagccgacaataaatcaagtaattaacctttaatatatctcttactgctatttttttccgggattgttatttccacgatgcaaatgacaatacccggaaaatccttctgaactcttcaccttacgcaatatcaaaaaaaatggtaatccataagatcattacttgtttgttcttcccttaacggcgcattattcttaagtcgtaatcgacagagaggcgaatatacagaggtgccctatgaaagatgtcgtagataaatgcagtactaaaggatgtgcgattgatatcggtacggtgattgataacgacaactgtaccagtaagttttcgcgcttttttgccacccgcgaagaagcagagtcctttatgaccaaactgaaagagcttgccgccgctgcatcctctgcagatgaaggggccagcgtggcctataagattaaggatctggaggggcaagttgagcttgatgcggccttcaccttctcatgccaggccgagatgattatttttgagttatcactgcgttcgttagcttgatggagttgctttagaaggagttaaacatggcttataaacacattggcgtggcaatttccgggaatgaagaagatgccttactggtgaataaagccctggagctcgccagacataatgacgctcacctgacgttaattcatattgatgatggcttaagcgagttgtatccgggtatctacttccctgcaacagaagatattcttcaattgttgaagaataagtcggataacaagctgtataaactgacgaaaaatattcaatggccgaagacaaaactgcgtattgaacgcggagaaatgccggaaacactgctggaaattatgcaaaaagagcagtgcgacctccttgtctgtggtcatcaccactcatttatcaaccgtttgatgccggcatatcgcgggatgatcaataagttgagtgcggatttgctcatcgtgccgtttatcgataagtaaccgcttaccagtaatgctccgctgtcatgtgacccggtcggcgacgtaaatgtttcgtcatctgccgggtctctttcagcaactgttgcgtatcgcgcaccatctgtggattgccgcacagcatcacatggctggtttctttattcatcggcaggccaatcgcgctttccagttcaccactttcaattaatgccggtatccgtccggtgagcgaccccgctgccgtttcccgactgaccaccgtctgaatgcgcagtttgccttcgtagcgtttttccagttcttgcatcagtggcaaatagcttaagtcggcggcataacgtgcggcgtgaaccaggaccagatttttgaagcgatctaaatctttacctagttgcagaatcgataaataagggccaatcgctgtaccggttgccagcatccatagcgtttcgcaatctggtacttcatccagaacaaagaagccagctgcttcgctaaccacctgcacttcatcgcccggtttcagtgccgccaatcgtgggcttaatttgccatcggggacggtgaccaggtaaaactccagatcgggattatcgggcgagttaacataggagtaggcgcgttggacgcgttcgccgtcgatttcaaggccaagcttggtaaattgcccggcggtaaacggatgcacaggggcgtgaacggtgagactaaacagggcgtcggtccagttctgcactttagtgactttgcctgttacccaatcagccatgtttttctcctgttttgattgaattgccttatcttcgttctccgaacaaaaaaattccagtcccgaaggactggaaggctcaatcgatcaaatcaatcagaggatgtgcacctgcatttccgggtctttgcgatccagatagtggatagactgaatgcggcgaatggtgcgtgatttgccgcggatcagcagcgtttcggtagtcgcgatattgcctttgcggctaatgccttccagcagatcgcctttggtaataccggtggcagagaagatgacgttatcgctgcgcgccatatcgcccagacgcaatactttaccggattcgatgcccatcgctttgcagcgtgccagctcctgctcgccaatgcgacgattctcttcgttgtcgcctttgacgtcatgacgcgccagcagacgaccgttcatgtcgccatctaatgcgcggatcaccgccgcagaaaccacgccttccggcgcgccaccaattccgtacagcacgtcaacttcgctgtctggcatacaggtgagaattgaggccgcaacgtcgccatccggaatagcaaatacgcgtacgccgagttgctgcatttcagcgataacggcatcgtggcgtggtttagccagaatcgttaccgtcagttcgctcaacggtttgccgagcgccntcncgacattgcgcaggttatccgccagcggcaggttcagatcaatggtgcctttggctcccggtccgacgatcagcttctccatatacatatctggcgcgttgaggaaacagcctttatcgcctactgccagcaccgccagcgcgttagcctgacccatcgccgtcatgcgcgtgccttcaatcggatcaacagcaatatctaccgcgtcgccgcgaccagtaccgactttttcaccaatgtagagcatcggtgcttcgtcgatttcaccttcaccaatgacgatggtgccgtcaatgttgacctggttgagcataatacgcatggcgtttaccgccgcgccgtccgcgnngtttttatcgccgcgtcctaaccatttgtagccagccagcgccgcagattcggtgacgcgggaaaattcgatggcaagttctcgtctcatagcaaactctaagcagtaaggaatggcgcgaagtgtagcacaggggaagggtgggattattgatgtgtgcggggttgcccccgcacggtttcagagtctgcgtgatgccggatgcggcgtgaacgccttatcccgcctacacaaaatggcattggctcgtaggcctgataagacgcgtaagcgtcgcatcaggcgatcagcatcaggcaatcgattcaggtgcctgacattactcgtcgtgttcttcccacgccatcgcgcgtttgaccgcttttttccagcctgcgtaacggtaattacgctcagtggtttcgatgcctggacggaactcgcgctcaatcaccgctttctcttgcagctcgtcgaggttctgccagaagccaaccgccaggcctgcgagataggccgcacccaatgcggtgacttcgcgaacttccgggcgctcaacgcgggtgccgagaatatcagactggaactgcatcaggaaattgtttgctactgcgccaccatccacgcgcagggcgtgcagacggataccagagtcggcctgcatcgcttccagcacgtcacgcgtctgataagcaatagactccagcgtcgcgcgtataatgtggttagcgttcaccccacgagtcagaccgaaaatcgccccgcgcgcatacgggtcccagtacggcgcacccagcccggtaaatgccggaaccacatacacaccattggtgttttgcactttggtggcgaaatattcggaatcgtaggcgtcgttaatcaacttcatctcatcgcgcagccactgaatggatgcgcctgccataaacaccgcaccttccaacgcatagttcacttcgccagtcgggccgcaggcgatggtggtcagtaggccgttttctgatttcaccgctttctcgccagtgttcatcagcataaagcagccagtgccataggtgttcttcgccatcccttctttcacgcacaactgaccaaacagcgcggcctgctggtcaccggcgatcccggagattggaatacgcgtgccgcctttgccgccaatgttagtctgaccgtacacttcggaagaacgacgcacttctggcagcatctcgcgcggaatatccagcacttccagcattttgtcgtcccagtccagggtatggatgttgaacaacatggtacgagaggcgttggtgtaatcggtcacatggacacggccctgagtcattttccagataagccacgtatcaaccgtaccaaacagcaattcaccacgacgcgcacgctcgcgagagccttccacatggtcgaggatccacttcactttggtgccagaaaagtacgggtcaatcaccagaccggtattgctgcggatataatcttctaaaccgtcacgttttaaatgctcgcagatttctgcggtacgacggcactgccagacaatggcgttatagataggcttgccggtttctttttcccagacaatagtggtttcacgctggttcgtaataccgatagctgcaatttgatcggaactgatatcggctttcgccagcacttctaccagcgtggagctttgggtggcccagatttccattgggtcgtgttctacccagcctggttttgggtagatttgctcaaattcgcgctgcgacacgctaatgatattggcatcgtgatccattacgaccgcgcgggagctggtggtgccctggtcgagcgcaacgatatattttttttcagtcatgtttaattgtcccgtagtcatattacagcgaagctttttgttctgaaggagttgtggtctccttttcttccacaacacagatatcgcaaggcaaatggcgaccaatcagtttgcggtaggcaaatgcacctacaatcgcgccaacgatagggccaaaaagcggcaccaggaagtaaggaatgtctctgccgccggtaaaggcgacattgccccagcccgccagccaggcaaagactttcggaccgaagtcacgcgctgggttcatggcaaaacccgtcaatgggcccatagatgcgccaatgaccgcaatcagtagaccaatcagcaagggagccaaagggccgcgtggtacaccgttgccatcgtccgttaacgccaggatcagccccatcagaatagcggtaatcaccatctcaactgcgaaagcctgcacaaaattgatatgaggattagggtaagtagagaaagtgcctgccagatcaacactttcaacgctgccgcgaacaatgtgatgagtctgctcgaagtcgaaaaataaattgtagtaaagcccgtaaactaaagccgcagcacagaaagcgccggcaacttgtgaaacgataaaaggaataactttgcgcttgtcgaaacaggcaaacagccacaatgcaatggtaacagcgggattaagatgcgcgccggaaacccctgcggtcaggtagatggccattgccacccccagtccccaaatgacactgatttcccactgaccaaaagacgcaccagcgacttttagtgctgcaacgcaacccacaccgaaaaaaatcaacaacccggtaccgaggaattcagcaatgcactggcctttcaaggttgatgtttgactcataatcggatcctgaaganttaatgtttgttgtatgcgtgaaagtcacggacctccacgatgcttgtaggcatgctgtaaacttatcgttaacgagcaaaaacgagaaatatcgaacttaaaatgtgtgtgcttcgtcataaaatgagcgttatcgcgccatttattccatctgattgtacatgatgcatgtttgttagaacattcgcgcaacaaatttattaacattttcgattggtgtggattatgtcaccaggagaaggatgaaaagtgtggcaaaccgtaatctgcaaggcgtgccgctggacagcgatggcgcggcttcatacaatcggagctaactaaagtgcgctcgtatttattaaggcgtcaccggtaatcgggacgaggattttttatccatcaacgccttgcaattcaggagaggtatgacaatgtcattagaagtgtttgagaaactggaagcaaaagtacagcaggcgattgataccatcactctgttgcagatggaaatcgaagagctgaaagaaaaaaacaactcactgtcgcaggaagttcaaaatgcccagcatcagcgcgaagagctggagcgtgagaacaaccatctgaaagaacagcagaacggctggcaggaacgtctgcaggccctgctgggtcgcatggaagaggtttaatctcttccacgcagaggcgccgcaaggcgccttattttttacttcactgtatttttagcagacaacataatctccatcgcctgttggcgatatttatctgccgtatctggctccattaatgcaatgatccccacagccctgggggtgtcttcaagataaacactgatggttcttttctgctgaccatcaaaatttatcaacacatcctgatacttacaggtgaaatgtttggcattacaatcatgaaactggaaggtttcttcattgtattgatccttgagattgtctcgctgcatcttctttaactcttccagcgagtcatcggcgctacgtcctgcgggcaggcggaaagcagaaataaagacgctattatcttcacttcttatatcaatggttttatcagtactaatagaaaccgtattccagtgtcggtttgggacagtcacggaaatagctgccttctcaaacgtatagtgccacggggtgaacagacgaaacgtattgccgacgttggataaaagcaggactcccaatacccaacagcacccgcgagtaaaactggcgaagttacgcgtttttttagtgaatgtgcacagaatacctgacacaagcacgggaagtaataacggtccaagaagtactgaaccgatatactcgccaaccatcccaggatctccagtaagcaagttactgtgctgaagatgactaagaaaaacagttattatccatagtattaataagataacgtatctcatatcaatccattattattaacatgcacatcagatcattgacgagcagaaagcatcattttcattacttcttcttgatattcgtccaaataatctgggtcgatagctgcgaccagttgtatcaaattagtgttatccagtagagtcatgaaaatagcatgtcttactttgccatcactcattgtttgcactccttcctgataagcgcaggcaaatccctgaacatcacaaacatgcatttctgcagttccgttttgagtcgcggtaagttcctcgattgaatgcacaccgagttcattttgtgagaaggcaacaatagctaaaatagcatgggcatcccgggtcaccagggttggtccttgttttactatattggcaacccactgtttgctcggaaccgtgacggtgatacctggctccgggaaagtataatcccatatgctgtgtcgttcccacaccgtatagctgctatagataagaaataatcccattaaccaacaagtgccgcgaataaagctgcggctgcttcttttttttatcgttatacagatgattgtggcgataataaatgataaggcaagtgggttaaaaaatacgttagcaaaatataaaatcatttcacccgcgttgccagataaaagaaatttgtagcggaaatggttaacggctataagtaataaatatataaataaaagaataatattctgcatgaatacgtccatgtataaaaaaggggaatttaattccccttttaacgcatggcagatacttattcaatatccagcggatcttctgaaagaataatcccggtattgtcggcataaagatggtcgccggagaagaaggtaacaccgccaaaattgacgcggacatcgctttcgccaatgccttcgccagcggcaccaaccggaattgccgccatcgcctggatgccgatatccaactcttccaggtcatctacctgacgcaccgcgccgtaaatgaccagaccttcccattcattttgtactgccagacgcgccagttcagcatcgaccagtgcgcgacgaacagaaccaccgccatcgacgacaagaacacgaccacggccattctgttcgagcagatcgtacagcaacccgttgtcctcgaaacattttaccgtgattatttgtccgccaaacgacgcccgtccgccaaagttggagaacagcggttccacgacgttaacatcttcttgatagatgtcacaaagctcggaagtatcgtatttcataggcttaacattcagttgctgcgagaattttcagtatatcgcgctatgtggtctgttggcaaaatcatcaattgttaattgatatttgtcagttatgctgcccactggcttaggaatatccctacaacaaacagcaggttagtcagtaacgctcccttgacagtgcgttccagcatcggtcgcatcgccaccgggtccatttcccgcatcacataacgggcttgcttcaccagcaacggtgccgccagcaggaacagccagccccacaggctatgcagcgaaaagagattaaacagcgccagacataccagagagcccatcagcaggcaggcatgataacgacgcgcgttcacttcacctaagcgcaccaccagcgtgtttttgccgttttcgcggtcgctattgatatcacgcaggttattaatgttcagtactgccgttgccagcaggccgcatgcggtcgccggaaggatcagtgccggaatcaatgtatgagcctgtaaataccagctccccatgacgcttaaccagccaaagaaaaccagtacggaaatatcacccagnccgatataaccataaggacgattgcccacggtgtaggtgatagcggcaatgatcgacaacccgccaagaatcaggaaaccgacaaaatcggccagcgtatggcacgccactgcaaccagtgccagcccggagagacagatgagcacgacggtaataatgagcgcccgtttcatctcttgctgggtaatgacccctttttgcatgccgcgtagcggtccgatacggtcaggtttatcgctgccttttaccgcatcgccgtaatcattggcgaggttagaaaggatctgtaatagcccggcggtaatcagtgccagcagggcgaccagcggatcaaaatgaccttgccaccatgccagcgccgtcccgacgataattgcagcaaaggcgagggggagggttttaggtcgtaaactttccagccacgcctgagttcggctaatttgttgttcagtcataatacgcgccaataaaaatggggcctttcagccccatcaaacaatgatgaaaatgattgaacgcgattataggataaaacggctcagatcttcatctgccaccaacgcatccagatgtttgctcacataatctgcgtcaatagtgatattttgaccgcttaaatcgctggcgtcgtaggaaatctcttccattaaacgctccagaacagtgtgtaaacgacgagcaccgatgttttcggtagattcgttcacctgccatgccgcttccgcgatgcgtttaataccggagtcggtaaactcgatatttacgccttcagtcgccatcagtgctttgtactgcacggtgatagaggcattcggctcggtcagaatacgctcgaagtcgctggtggtcagtgcctgcagttcaacgcggattggcagtcgaccttgcagttccgggatcaggtcagacggtttcgcaatctggaacgcgccagaagcgataaacagaatgtggtcagttttgaccatcccgtgtttggtggaaacggtgcaaccttctaccagcggcagcaggtctcgctgaacgccttcacgagaaacatccggaccggaagactcgccgcgcttacagattttgtcgatttcgtcgataaacacgatcccgtgctgctcaacagcgtcgatagcgtcttgcttcagctcttccgggttcaccagtttcgccgcttcttcttcaatcagcagcttcatggcgtctttgattttcagcttacgcgctttttgcttctgaccgcccaggttctggaacatggactgcagctggctggtcatctcttccatgcctggaggagccataatttcaacgcccatcggtgctgcggcaagatcgatctcgatttctttgtcatcaagctggccttcacgcagttttttgcggaatgcctgacgagcagcggacggttcctgctgctgttcggtctgtccccagttgtttttagcaggtgggatcagcacgtcgagaatacgttcttctgccagttcttcagcgcgataacggtttttctcgatagcctggacgcgtaccattttcacggcggcatcggtcagatcgcgaataatagaatccacttccttaccgacgtagcccacttcggtgaatttggtcgcttcaactttgatgaacggcgcattcgccagcttagccagacgacgggcgatttcagttttaccgacaccggtcgggccgatcatcaggatatttttcggggtcacttcatggcgcagctcttcgttgagctgcatgcgacgccagcggttacgcagagcaatcgccacggaacgcttggcgttgtcctggccgatgatgtgcttatccagttcgctgacgatttcgcgtggggtcatttcagacatgggagatccttacgctttgtagcttaattcttcgatggtgtggaaatggttggtatagatgcaaatgtcgcctgcaatatccaacgccttttcagcaatttcacgagcactaagttcagtattttctaacagtgcacgcgccgcagcctgggcgtaagggccgccggagccgatagcaataagatcgttttctggctgcaccacgtcaccgttaccggtgatgataagcgatgcagtttcatccgcgactgccagcagtgcttcaagtttgcgcaacatgcgatcggtacgccagtcttttgccagctcaacggcggctttgaccagatggccctgatgcatttccagtttacgttcaaacagttcgaacagcgtaaaagcatccgcagtaccgcccgcaaagcccgcgatgactttgtcgttgtacagacggcggacctttttcacgttgcctttcattacggtattgcccaacgtggcctgaccatcaccagcgatgaccacatggccgttacggcgtacgcttactatagttgtcacgagctgaccccttggttacgaatacagagtacaaaccccgtacaaaagtacggggcataatgcaattatagatgggggggattttgagggtttcaacccccggcggcgagccgaatgcagtttgtatgacccgccatcttcaaccgattgagggtgctgtctgcgttctctttgcctttcaccgggccaatgaccacacgattccagccattgttggtggtaatttttgagtcaaagccttcgaacgccagctgagcacgtaccgtctctgcctgttccgcgcctctgaacgaaccgcactgcaccatccagcggcgttcgtcttttttctccgccgtcggttttggcgcgtcagcggcacgagtaaccggcgcagcttgctgcggcttcgactgcgcggtcgtgtgcgcaggggtttgcagcagatcctggtacggctgctgagtagaagccggtttagactggcgcggttgcgcctgtnnnngcgcggcttgcgacgtacgcgtctgctgctgccagctttgttcagtcgtacgcgactgctgagccaggcgttgctgttccgctaattgctgcgcctgacgttggcgctgtagcgtttgctgacgctgttccggcgtctgttcattccacggaacttcaaccagctgcgttggctgctggcgcatatcagcctgcatttgttcaagaagctgacgttgttctggtgtcagttgctccggcgttttcacttcaccaccggcagaaggttctgtgggcgcacgcacacccggctggcgactttccagctctttgatgtagcgccagcgttcttctggttttggtggtagtccgtttccggtcactttctggctttgcagcgtctcggactcttctttcttgtgatgcgtaatgaagtacagaccaccgataaaggtcacaagaacggcggcagcaatagcgaccatagcgggagaaaccgcaggcagatttcgttgctttttccgtgaggtgctcttttttcgccgcgaaggtgccggttggctgcggcgtacataatctcgttgtgccactatcgtttcgctgtatttattcgttcgtcagcccgccatgttacttaagcggcgggcctttgaccagtcacggcagtcttaaaggtttactttaaggtaacgcgcgtgttgatccccggatgataagttcgcagtccattaaacgagagccactgccaacgtgttgcccctgcatttgatcaagcaataacagcatagcttcccgaccgatttcgtaacgcggctgcgcgatggttgtcagcggcggatcacaaaattgcgtcaggtcgatgttatcaaaaccgattatggaaaggtcttccgggactttcagcccctggcgttttgcctgagaaagtgcgccgagcgccatcacatcgctatggcagaagacagcagtaggcggttgtggaagatcaagcagctgctgcatcgctttgcttccggcttcgaaggtgaagtcgccacgggcgatgtattgcggatcaaccataatgccgcagcgacgcagcgcctgaacgtaaccttgcaggcggtagtgacacagcggcatctcttcgggaccggctatacagccaatccgtttatgcccttgctcatataaataatttactgcatcaaatgcggcggtcagattgtcgatatgaacggtaggcagctccagttccggtgcaaattcgttcgccatcaccatcggcggcagattacgctgttcctcaatgctggcatcaaacggcagccttgaacccagcagcaacatgccatcaatttgcttggtgatgatcaaatcgataaaggttttttcctgctgattttgatgcgcacagtcgccaatcagcaccagatatccgtgatttgccgccgtaacttcgataccgcgaataatttcgctaaagaagggatcgcagatatccgggacaatcaccagaatggtgcgggattcattacgcttgacgttgcgccccataggctgcggtaaataacccacttcacgggccgctttttcaacccgattacgggtggcttgggagactttatcgggattcattaatgctcgggagacggtcgctgtagagacttttgccttgagggcaacgtctttcatggtcgcggcagtttcctgcttcttcgctttcacactcactcctcgcctggcacgtcaggcgtactacatccatgtttacttcacatcggcaacatttttagcagatagcgcgtgaaaacggttacagaattttcatgaaaagtgtgatgaatattgaatttttcgatccgcctcgcatcgtgagcggtttaaccctcaatcggatcaacatccagcacccatttcaccttacgggaatccggtattgtattgatgagtgccagcgtaccgttaatgatgtgttgcaagcgcacgcgggaagggtgctgcaacaatatctgccagcgccagcgaccgccacgtttaggtgccagtgccggaaccggaccgagaacccacaatttgtcgtctgccagcgggctggagaggatcagattacgcagttgttgcaggaacaatggcgcgtgctgattgttatgatcttccgcacgcacaatcacatggctggtccacggcggcagttgcatcattcgccgctcagccagtgcctgttcggcaaaagcgtcgtagcctttatagagcaacgtttgcaatagcgggtgttccggatgatgcgtttgcagcaccacttcgccctgtttacccgcacgcccggcacggcctgctacctgggtgtatagctgggcaaaacgctctgccgagcgaaaatcggcagaaaacagcgcgccgtccacatccagtaacgctaccagcgtcacatccggaaagtggtgacctttcgccagcatttgcgtgccaatcaatatcctcgcgccgccgcgatgcacttccgccagttgttgttccagcgctcctttgcggctggtggtatcgcggtcgatacgagaaatgggcacaccagggaataacggcgcgagcgtctgttcaagctgttcggtgcccagccccacgggtaccaggtgcgtggaaccgcaggaagggcactggcgcggcaccgggcgttggctgtcacagtggtgacagcgcaaatgctgttgcgcctgatgcagcgtgtagtagtgatcgcaacgtggacattcggcaatccagccgcagtcgtggcacagcaaggcaggcgcaaagccacggcggttaagaaagaggataacctggttgtcggcctgtaaatgctggcgcatacgggtgattaacgccggagccagccccgcctgcaccttctgaccttttaaatccagcacatgttgaattgccggacgcgcattccccgcccgacgcgtcaggcgcagcaggcggtattttttntgctggacgttgcataacgtttccagtgcgggtgttgcggagccaagaataatcgggatttgctcgctgtgcgcacgataaaccgccaggtcgcgggcatgatagcgccagccttcctgctgcttgtaggaactgtcgtgctcttcatcaatgacaatcacaccgagatttttaaacggcgtaaacagcgcggagcgggtgccgatgacaatcgccgcctcaccatttttcgctttcaaccacgccgaaagacgctcgctgtcgttcaggccggaatgcagaacttctacgggggcattaaaacgttcacgaaaacgggcgatagtttgcggtgtcaggccgatttccggcaccatcaccagcgcctgtttgccctgagcgagcacgttttccagtacgctcaaataaacctctgttttaccggaacctgtaacgcccgccagcagccaagcagagaaggtatccgccgcgctatgaattgcgccaacggcggtggcctgttcggtattcaatcgcaaccgttcaccagaaacggcatagttcgttcgccagtcgctaaactctggtgtttcacttgctaaatcacacagaccttttttgcgcagcgcctgtaacgcggcatcattaaattcaagcgtggcaacctggtcgcgccagattttgccttgccgcaatgccgccagtgcctgttgttgctttggcgaacgtttcaggctgttcagatccaccgcatggccttgttcagtggcaaaccagtaccacatcggcgcgttcgccgcaggccgcccctggcgcagtaaaatcggcaaggcatgaaacagcacatcgccaatcggatgatgatagtaatccgccgcccagagcagcaatcgccagacggagtgagtaaacaccggctcactatccagcacttcgactaccgcttttagctcgttaagcggcagctcactgacgtcgctaactgacaccacaaccccgatgcgctcctgctgtttgccaaacggcacgcgcacgcgacacccggctttaaccgccatgccttctggcaggagatagtcaaaggtacgaggaagcggaacgggcaaggcaacgtgggcaacgggcatagcatcatcctgacttgaaattcggtgggttagtatacacattgccgtagaagagtgcggatcagtttgcatacgctggttaatttctgtatgatttcgcgccttcgtacgaaatgatcgtattgaagctatacttttaacatcgcgtggtgtctggcgttagggctggaagagcgacgcggccttaaaccgaggttttcccatgaaaaaagatattcacccgaaatacgaagaaattactgctagctgctcttgcggtaacgtaatgaaaatccgctccaccgttggtcatgacctgaacctcgacgtgtgcagcaagtgccacccgttcttcactggcaaacagcgtgatgttgctaccggtggccgtgttgaccgcttcaacaagcgtttcaacatcccgggcagcaaataagaccggatttccgaaaaaagcgc

SEQ ID NO: 1637 - DNA, 1197 bp, Escherichia coli
  Strain O55:H7
  modified_base (186)..(186): a, c, g or t
  modified_base (252)..(252): a, c, g or t
  modified_base (285)..(285): a, c, g or t
  modified_base (735)..(736): a, c, g or t
  modified_base (818)..(821): a, c, g or t
  modified_base (824)..(825): a, c, g or t
  modified_base (854)..(855): a, c, g or t
  modified_base (908)..(909): a, c, g or t
  modified_base (1080)..(1081): a, c, g or t
  modified_base (1166)..(1166): a, c, g or t
tttttttgtgcctgtaatttgccttttataaattctgaaaaattccggggtgttaactcattatcatttcctgttgttgactggcgctaggcttctggttcttatttatttcaaaaggattttacgatgagcggaaaaccggcggcgcgtcagggcgacatgacgcagtatggcggtagcattgtncagggttcagccggggtgcgcattggtgcccccaccggcgtggcctgttcggtgtgccccggcggngtgacgtccggccatccggtcaatccgctgctnggtgcaaaggtccttcccggtgaaaccgacatcgccctgcccgccccgctgccgttcatcctctcccgcacctacagcagttaccggacaaaaacgcccgcgccggtggggagcctcggccccggctggaaaatgcctgcggatatccgcttacagctgcgcgataacacactgatactcagtgataacggcggcagaagcctgtattttgagcacctgtttcccggtgaggacggttacagccgcagcgagtcactctggctggtgcgcggcggcgtggcgaaactggatgaaggtcaccgggctggccgcactctggcaggcgctgccggaagaactccgcttaagtccgcatcgttatctggcgacaaacagtccgcaggggccgtggtggctgctcggctggtgtgagcgggtgccggaagcggatgaggtgctgcctgcgccgcnnccgccgtaccgggtactgaccgggctggtggaccgcttcgggcgcacacagacgttccaccgcgaagccgccggtgaattcnnnngcnnaatcaccggcgtgacggatggtgccgggnntcacttccggctggtactgaccacgcaggcgcagcgggcagaagaagcccggnngcaggccatttccggcgggacggaaccgtccgcttttcctgataccctgtcgggttacaccgaatatggccgggacaacggcatccgtctgtctgccgtgtggctgacgcacgacccggaatacccggagaatttacctgccgcgccgctggtgcgctatggctggacgcnncgcggcgaactggcggtggtgtatgaccgtagtggcaaacaggtgcgcagctttacttacgatgataaataccggggccggatgntggcgcaccgtcacacgggccggccggaaat

SEQ ID NO: 1638 - DNA, 2137 bp, Escherichia coli
  Strain O55:H7
  modified_base (102)..(102): a, c, g or t
  modified_base (944)..(947): a, c, g or t
  modified_base (967)..(967): a, c, g or t
  modified_base (2045)..(2045): a, c, g or t
ggcgggtgacagaacagctaaacccggcaggcttaagctacacgtatcagtatgagaaagaccgcatcaccatcaccgacagcctgaaccgccgtgaagtcntgcacacgcagggtgaaggcgggctgaagcgggtggtgaaaaaggaacacgcggacggcagcgtcacgcagagtcagtttgacgcggtgggcaggctcagggcacagacggatgccgcaggcaggacaacagaatacagcccggatgtggtgacgggcctcatcacgcgcatcaccacgccggatggcagggcatcggcgttttactataaccaccacagccagttaacgtcagccaccgggcctgacgggctggaaatacgccgggaatatgatgaatggggccgtctgattcaggaaactgcccctgacggcgatatcacccgctaccgttatgataatccacacagtgacttaccctgcgcaacggaagatgccaccggcagccggaaaaccatgacgtggagccgttacggtcagttgctgagcttcaccgactgttccggttatgtaacccgttatgaccatgaccgcttcgggcagatgacggcggtgcaccgcgaggaagggctgagtcagtaccgcgcatacgacagccgtggacagttaattgccgtgaaagacacgcagggccatgaaacgcggtatgaatacaacgccgccggtgacctgaccaccgtcattgccccggacggcagcagaaacgggacacagtacgatgcgtggggaaaagccatctgtaccacgcagggcggtctgacgcgcagtatggaatacgatgctgccggacgggtcatccgcctgaccagtgaaaacggcagccacaccaccttccgttacgatgtactcgaccggctgatacaggaaaccggctttgacggccgcacacagcgttatcaccannnnctgaccggcaaacttatccncagcgaggatgaggggctggtcacccactggcactatgacgaagcagaccgcctcacgcaccgcaccgtgaagggtgaaaccgcagagcgctggcagtatgacgaacgcggctggctgacagacatcagccatatcagcgaagggcaccgggtgacggtgcattacgggtatgatgagaaaggccggctgaccggtgagcgtcagacggtgcatcacccgcagacggaagcactgctctggcagcatgagaccagacacgcttacaacgcgcaggggctggcgaaccgctgtataccggacagcctgcccgccgtggaatggctgacctatggcagcggctggctggcaggcatgaagctcggcgacacaccgctggtggatttcacccgcgaccgcctgcaccggaaaacgctgcgcagattcggccgttatgaactcaccaccgcttatacccctgccgggcagttacagagccagcacctgaacagcctgcagtatgaccgcgattacacctggaacgacaacggcgaactcatccgcatcagcagcccgcgccagacccggagttacagctacagcgactccggcaggctgaccggcgttcacaccaccgcagcgaatctggatatccgcatcccgtatgccacggacccggcaggtaaccgcctgcccgacccggagctgcacccggacagcaccctcagcatgtggccggataaccgtatcgcccgtgacgcgcactatctttaccggtatgaccgtcacggcagactgacagagaaaaccgacctcatcccggaaggggttatccgcacggatgatgagcgcacccaccggtaccattacgacagtcagcaccggctggtgcactacacgcggacacaatatgcagagccgctggtcgaaagccgctatctttacgacccgctgggccgcagggtggcaaaacgggtgtggcgacgtgaacgggacctgacgggctggatgtcgctgtcacggaaaccgcaagtgacctggtacggctgggacggcgaccggctgaccacgatacagaacgacaggagccgcatccagacnatttatcagccggggagcttcacgccactcatcagggttgaaaccgccaccggtgagctggcgaaaacgcagcgccgcagcctggcggatgc

SEQ ID NO: 1639 - DNA, 183 bp, Escherichia coli
  Strain O55:H7
  modified_base (2)..(2): a, c, g or t
  modified_base (4)..(5): a, c, g or t
  modified_base (7)..(8): a, c, g or t
  modified_base (33)..(34): a, c, g or t
gnanncnngcggcgaagacggtggcagtgtggnnttcccgccggtgctggtgcagatgctcgaccggctggaaagtgaaatcctggctgaccgggtgagtgaggaaagccgccgctggctggcatcgtgcggcctgactgtggcgcagatgcaaagccagatggacccggtatacacgccggc

SEQ ID NO: 1640 - DNA, 39795 bp, Escherichia coli
  Strain O55:H7
  modified_base (114)..(117): a, c, g or t
  modified_base (124)..(125): a, c, g or t
  modified_base (150)..(150): a, c, g or t
  modified_base (210)..(210): a, c, g or t
  modified_base (2095)..(2095): a, c, g or t
  modified_base (9256)..(9256): a, c, g or t
  modified_base (9344)..(9344): a, c, g or t
  modified_base (9882)..(9882): a, c, g or t
  modified_base (11508)..(11508): a, c, g or t
  modified_base (11612)..(11615): a, c, g or t
  modified_base (11618)..(11618): a, c, g or t
  modified_base (12138)..(12138): a, c, g or t
  modified_base (13791)..(13794): a, c, g or t
  modified_base (14509)..(14509): a, c, g or t
  modified_base (14695)..(14695): a, c, g or t
  modified_base (14865)..(14865): a, c, g or t
  modified_base (21893)..(21893): a, c, g or t
  modified_base (23761)..(23761): a, c, g or t
  modified_base (26643)..(26643): a, c, g or t
  modified_base (28531)..(28531): a, c, g or t
  modified_base (28798)..(28798): a, c, g or t
  modified_base (35358)..(35358): a, c, g or t
  modified_base (38221)..(38221): a, c, g or t
  modified_base (38562)..(38562): a, c, g or t
  modified_base (38627)..(38627): a, c, g or t
cacctgtaccactgcgaccatcgcggcctgccgctggcccttatcagtaaggaaggggcaacagaatggtgcgcagaatacgatgagtggggcaacctgctgaatgaagagaannnncatcagnngcagcagcttatccgcctgccgggncagcagtatgatgaggagtccggcctgtattacaaccgccaccgctattatgacccgctncaggggaggtatatcactcaggatccgattgggctgaaggggggatggaacctgtatacatatccgctgagcccggtgaatggcatggatccattaggattatatgaatttaaatcaaaaaatatagatgatattggaatatttgcattggcaatgtgtaatggagaatcaattaacgagaataaagaatatggtggactaatatgtaagaagcaaggtgaatatttccccatgaatccgataagttcaaatgataatgatagtgtagacttgcgaaatataaaatgccctgaaggttcagagagagtaggcgattatcacactcacggtttttactctgacgataaaggaaataaagtaacaaaagaaaatgatgtttatgatagtctaaatttttcaagcaaagatttaacgaattcttatatgaatggaatgggaaaaaaagaatacagtagttacttgggaacaccaaataacacctatctaaaatataatcccaaagctaaagggaatggagttacaattatcaggcaagggagtaattaaaatgaaggcaatacaatgttgttatttccttgctttagtctccagtcatttaatggctggagttatgagtgatgacaatatatttttaagtaattcggatttagctgctttatattgtgtggctaaaatatttccagatggagaaaatattttaatatataaagtaaatataattaatgctagttcaaaaaagatgtatttttttatgaaagcccaacatcaacccacaatgacataatggggggcgggggaatgtcatatgcctatgaatatgatgtaaaatataatatatgtcatttgagaaaaaagagcagaatgaggtaaaaatctttggctgtgtattcagtctggtaatcatccaaggaaagctcatcagaagggtgatgactccaattagtagaacatatattttcgataaaagcaccgatgactttttcatgaagttctacagaactcgagaaacagatggttctgcgggccagacgtttgattcgggttctcagggtcagattgttacgctcaatgtgctgagtaaaaatcttaccagtcagatgcttctcctttggtaactctctagcgtaactaccccattcgtcagtggtcaacatgccgatggtaaaagggtaagcagcgccagcaattcacgacaggtttcatcagtccgggggccaaaagtgtaggccagaacaccaccagttttcgtgttgtacacgtaccagagccagtgctgtcgcgctttactgccgacaaagctccattgctgactaagtttgcagatgagtgccacatcagcatgagcgaccggggatgacgttattcttcgtggcgagagttttttaaagttcggatgactgtattaatgccgattttcagcgtacgggcagtatagcgaaccccggcaccgttgaaagccatttcagcgatttggtctttaactcccggtttacggggctcgtaacagtaactgagctgaaatacccggtgacagtcacggccgcggaatcgatcatgtcttttggggttctgcccgcgacggtaaacctgaacggactggcaacggggacaatgaaggttaactgtgaccatgaaacatccttaaaagcgagtattatatccttaattcaactaattggaggcatcaccgtttaccggagcgacagcttgcggaaaggtcgtgcaactacaaagcaacaaacagactacggcgggaattatttttttcatcatccattaccacgaaaacagcggccattctttggcaaccgtggtgagttgtggcgcatcgaaaacggcttgtggtgagaccaccgtttcctcaagcggaatatttttgccgtancgttctttgagcttcgcctggaccagcgggttgctgagatcaaactctttcaacttctgctgttcgcccacacgcattcccagcgcattctgataaaccttccacaccacttccgaacagtactggcgatcgtcgctccatgagaagctgaaatcgtacggtttgccgagataacgtttcgccgtttgcgccagtttttgctgttgttcaacactcagtccgccttcaacgcggcgaacaacgtatttgcccttttcaccatgggcaatccactgcttgagcggggtgtatttcaccgggccgaccgcttcaaaaacgtagggctttttgttacgcatcaccagcataccggtgtggctgtaatcggaatgggtcgccagttggatcgctttactttgcgatgagcgagagatttgaaagatgatgtcgccagtttgcggctgccaggcaaaggcaggcacagaaaccagcaggctgaggatcagtagcctgattttcatcgttaaacgtccttgtatgaaaaaagcggctggttaactccgcgccgctcttttccgctttagtattcccacgtctccgggttaatccccatctcacgcatgatctcttttgccgcttccgggatttcgtcgctgcgctctttacgcagatcggcatcatccggcaaaggttgcccggtaaaggcatgcagaaacgcttcgcacagcagctcgctgttggtagcgtgacgcaggttgttcacctgacgacgcgtgcgttcatcggtgaggatttttaacaccttaagaggaatggaaaccgtaatctttttgacttgttcactcttcttgccgtgctcagcgtatgggctgatatattcgccgctccattcagccatgagatacttaatcctcttcgtcaataaattgagaccagaccacacaatttatgtgggtactgaccgtaaacccgcatagtttaccgtacaggcgttaccgtgacatcgtgtaatgcacctgtcggcgtgataatgcatataattttaacggctatttgggatttgctcaatctatacgcaaagaagtttagatgtccagatgtattgacgtccattaacacagtgtttactctggtgcctgacatttcaccgaccaagcccagggaacttcatcacatgacgcgtaaacaggccaccatcgcagtgcgtagcgggttaaatgacgacgaacagtatggttgcgttgtccctcccatccatctttccagcacctataactttaccggatttaatgaaccgcgcgcgcatgattactcgcgtcgcggcaacccaacgcgcgatgtggttcagcgtgcgctggcagaactggaaggcggtgctggtgcagtacttactaataccggcatgtccgcgattcacctggtaacgaccgtctttttgaaacctggcgatctgctggttgcgccgcacgactgctacggcggtagctatcgcctgttcgacagcctggcgaaacgcggttgctatcgcgtgttgtttgttgatcaaggcgatgaacaggcattacgggcagcgctggcagaaaaccccaaactggtactggtagaaagcccaagtaatccattgttacgcgtcgtggatattgcgaaaatctgccatctggcaagggaagtcggggcggtgagcgtggtggataacaccttcttaagcccggcattacaaaatccgctggcattacgtgccgatctggtgttgcattcatgtacgaaatatctgaacggtcactctgacgtggtggctggcgtggtgattgctaaagacccggacgttgtcactgaacttgcctggtgggcaaacaatattggcgtgacgggcggcgcgtttgacagctatctgctgctacgcgggttgcgaacgctggtgccgcgtatggagctggcgcagcgcaacgcgaaggcgattgtgaaatatctgcaaacccagccgttggtgaaaaaactgtatcacccgtcgctgccggaaaatcaggggcatgaaattgccgcgcgtcagcaaaaaggctttggcgcaatgttgagttttgaactggatggcgatgagcagacgctgcgccgtttcctgggcgggctgtcgttatttacgctggcggaatcattagggggagtggaaagtttaatctctcacgccgcaaccatgacacatgcaggcatggcaccagaagcgcgtgctgccgccgggatctccgagacgctgctgcgtatctccaccggtattgaagatggcgaagatttaattgccgacctggaaaatggcttccgggctgcaaacaaggggtaaaaatgagtgtgattgcgcaggcaggggcgaaaggtcgtcagctgcataaatttggtggcagtagtctggctgatgtgaagtgttatttgcgtgtcgcgggcattatggcggagtactctcagcctgacgatatgatggtggtttccgccgctggtagcaccactaaccagttgattaactggttgaaactaagccagaccgatcgtctctctgcgcatcaggttcaacaaacgctgcgtcgctatcagtgcgatctgattagcggcctgctacccgccgaagaagccgatagcctcattagcgcttttgtcagcgatcttgagcgcctggcggcgctgctcgacagcggtattaacgacgcagtgtatgcggaagtggtgggccacggcgaagtgtggtcggcgcgcctgatgtctgcggtgcttaatcaacaagggctgccagcggcctggcttgatgcccgcgagtttttacgcgctgaacgcgctgcgcaaccgcaggttgatgaagggctttcttacccgttgctgcaacagctactggtacaacatccgggtaaacgtctggtggtgaccgggtttatcagccgtaacaacgccggtgaaacggtgctgctggggcgtaacggttccgactattccgcgacacaaatcggtgcgctggcgggtgtttctcgtgtaaccatctggagcgacgtcgccggggtatacagtgccgatccgcgtaaagtgaaagatgcctgtctgctgccattgctgcgtctggatgaagccagcgaactggcgcgtctggcggctcccgttcttcacgcccgtactttacagccagtatccggtagcgaaatcgacctgcagctgcgctgtagctacacgccggatcaaggctccacgcgcattgaacgcgtgctggcctccggtactggtgcgcgtattgtcaccagccacgatgatgtctgcttgattgagtttcaggtgcccaccagccaggatttcaaactggcgcataaagagatcgaccagatcctgaaacgtgctcaggtgcgcccactggcggttggcgtgcataacgatcgccagttgctgcaattttgctacacctcagaagtggccgacagtgcgctgaaaatcctcgacgaagcgggattacctggcgaactgcgcctgcgtcaggggctggcgctggtggcgatggtcggggcgggtgtcacccgtaacccgctgcattgccaccgcttctggcagcaactgaaaggccagccggtcgagtttacctggcagtccgatgacggcatcagcctggtggcagtactgcgcaccggcccgaccgaaagcctgattcagggcctgcatcagtccgtcttccgcgcagaaaaacgcatcggcctggtattgttcggcaaaggcaatatcggttcccgctggctggaactgttcgcccgcgagcagagcacgctttcggcgcgtaccggctttgaatttgtgctggcaggcgtggtggacagccgccgcagtctgttgagttatgacgggctggacgccagccgcgcgttagccttcttcaacgatgaagcggtcgagcaggatgaagagtcgttgttcctgtggatgcgcgcccatccgtatgatgatttagtggtgctggacgttaccgccagccagcagctggctgaccagtatcttgatttcgccagccacggtttccacgtcatcagtgccaacaaactggcgggagcaagcgacagcaataaatatcgccagatccacgacgccttcgaaaaaaccgggcgtcactggctatacaacgccaccgtcggtgcgggcttgccgatcaaccataccgtgcgcgatctgatcgacagcggcgatactattttgtcgatcagtgggatcttctccggcacgctctcctggctgttcctgcaattcgacggtagcgtgccgtttaccgagctggtggatcaggcgtggcagcagggcttaaccgagcctgatccgcgtgacgacctctccggcaaagacgtaatgcgcaagctggtgattctggcgcgtgaagcgggttacaacattgaaccggaccaggtacgtgtggaatcgctggtgcctgctcattgcgaaggcggcagcatcgaccatttctttgaaaatggcgatgaacttaacgagcagatggtgcaacggctggaagcggcccgcgaaatggggctggtgctgcgctacgtggcgcgtttcgatgccaacggcaaagcgcgtgtgggcgtggaggcggtgcgtgaagaccatccgctggcatcactgctaccgtgcgataacgtctttgccatcgaaagccgctggtatcgcgacaacccgctggtgatccgtgggcctggcgcggggcgcgacgtcaccgccggggcgattcagtcggatatcaaccggctggcacagttgttgtaatttcagaaatttaataatgcccggtactcatgttttcgggtttatggtttctaatgaaatatattgaattatcataggattaggccggatgaagcgtttacgacgaatccggcaagaagcaataagtacatggttagtttatatttgcagtccggtttgctttgcataccggattttctttttcttaccatcctgaagttttttcatcttccctgatttttcctcaccatcattggtcatttttcggttgacgcccttcggcttttccttcatctttacatctggacgtctaaacggatagatgtgcacaacacaacatataactacaagcgattgatgaggtaaggtatgagcttttttcacgccagccagcgggatgccctgaatcagagcctggcagaagtccaggggcagattaacgtttcgttcgagtttttcccgccgcgtaccagtgaaatggagcagaccctgtggaactccatcgatcgccttagcagcctgaaaccgaagtttgtatcggtgacctatggcgcgaactccggcgagcgcgaccgtacgcacagcattattaaaggcattaaagatcgcactggtctggaagcggcaccgcatcttacttgcattgatgcgacgcccgacgagttgcgcaccattgcacgcgactactggaataacggtattcgtcatatcgtggcgctgcgtggcgatctgccgccgggaagtggtaagccagaaatgtatgcttctgacctggtgacgctattaaaagaagtggcagatttcgatatctccgtggcggcgtatccggaagttcacccggaagcaaaaagcgcccaggcggatttgcttaacctgaaacgcaaagtcgatgcaggagccaaccgcgcgattactcagttcttctttgatgtcgaaagctacctgcgttttcgtgaccgctgtgtgtcggcgggcattgatgtggaaatcattccgggcatattgccggtatctaactttaaacaggcgaagaaatttgccgacatgaccaacgtgcgtattccggcgtggatggcgcaaatgtttgacgggctggatgacgatgccgaaacccgcaagctggtgggcgcgaatattgccatggatatggtgaagattttaagccgtgaaggagtgaaagatttccacttctatacgcttaaccgcgctgaaatgagttacgcgatttgccatacgctgggggttcgacctggtttataaatagtgtggcttttatgaaaatcacacagtgatcacaaattttaaacagagcacaaaatgctgcctcgaaatgagggcgggaaaataaggttatcagccttgttttctccctcattacttgaaggatatgaagctaaaacccttttttataaagcatttgtccgaattcggacataatcaaaaaagcttaattacgatcaatttgatctacatctctttaaccaacaatatgtaagatctcaactatcgcatccgtggattaattcaattataacttctctctaacgctgtgtatcgtaacggtaacactgtagaggggagcacattgatgagcacgtcagacgatatccataacacgacagccactggcaaatgcccgttccatcagggcggtcacgaccagagcgcgggggcgggtacaaccactcgcgactggtggccaaatcaactccgtgttgacctgttaaaccaacattctaatcgttctaacccgctgggtgaggactttgactaccgcaaagaattcagcaaattagattactacggcctgaaaaaagatctgaaagccctgctgacagaatctcagccgtggtggccagccgactggggcagctacgccggtctgtttattcgtatggcctggcacggcgcggggacttaccgatcaatcgatggacgcggtggcgcgggtcgtggtcagcaacgttttgcaccgctgaactcctggccggataacgtaagcctcgataaagcgcgtcgcttgttgtggccaatcaaacagaaatatggtcagaaaatctcctgggccgacctgtttatcctcgcgggtaacgtggcgctggaaaactccggcttccgtaccttcggttttggtgccggtcgtgaagacgtctgggaaccggatctggatgttaactggggtgatgaaaaagcctggctgactcaccgtcatccggaagcgctggcgaaagcaccgctgggtgcaaccgagatgggtctgatttacgttaacccggaaggcccggatcacagcggcgaaccgctttctgcggcagcagctatccgcgcgaccttcggcaacatgggtatgaacgacgaagaaaccgtggcgctgattgcgggtggtcatacgctgggtaaaacccacggtgctggtccgacatcaaatgtagntcctgatccagaagctgcgccgattgaagaacaaggtttaggttgggcgagcacttacggcagcggcgttggcgcagatgccattacntctggtctggaagtggtctggacccagacgccgacccagtggagcaactatttcttcgagaacctgttcaagtatgagtgggtacagacccgcagtccggctggcgcaatccagttcgaagcggtagacgcaccggaaattatcccggatccgttcgatccgtcgaagaaacgtaaaccgacgatgctggtgaccgacctgacgctgcgttttgatcctgagttcgagaagatctctcgtcgtttcctcaacgatccgcaggcgttcaacgaagcctttgcccgtgcctggttcaaactgacgcacagggatatggggccgaaatctcgttacatcgggccggaagtaccgaaagaagatctgatctggcaagatccgctgccgcagccgatctacaacccgaccgagcaggacattatcgatctgaaattcacgattgcggattctggtctgtctgttagtgagctggtatcggtggcctgggcttctgcttctaccttccgtggtggcgacaaacgcggtggtgccaacggtgcgngtctggcattaatgccgcagcgcgactgggatgtgaacgccgcagccgttcgtgctctgcctgttctggagaaaattcagaaagagtctggtaaagcctcgctggcggatatcatcgtgctggcaggtgtggttggcgttgagaaagccgcaagcgccgctggtttgagcattcatgtaccgtttgcgccgggtcgcgttgatgcgcgtcaggatcagactgacattgagatgttcgaactgctggagccaattgctgacggtttccgtaactatcgcgctcgtctggatgtttccaccaccgagtcactgctgattgataaagcccagcaactgaccctgaccgcgccggaaatgaccgcgctggtgggcgggatgcgtgtactgggtgccaacttcgatggcagcaaaaacggcgtcttcactgaccgcgttggcgtattgagcaatgacttcttcgtgaacttgctggatatgcgttacgagtggaaagcgaccgacgaatcgaaagagctgttcgaaggccgtgaccgcgaaaccggcgaagtgaaatacactgccagccgtgcggatctggtatttggttctaactctgtcctgcgtgcggtggctgaagtttacgccagcagcgatgctcacgagaagtttgttaaagacttcgtggcggcatgggtgaaagtgatgaacctcgaccgtttcgacctgctgtaatctgaccttcttcagcgactgcctttcaggcagtcgctgaagtttctttaccggcgtatagtgtccacaggaaaactacacactggatctctcatgtctgccgcaggaaagagcaacccactggcaatcagtggcctggttgtgctcacacttatctggagttatagctggattttcatgaagcaagtcaccagctacatcggtgccttcgactttaccgccttacgctgcattttcggcgctctcgttttattcatcgtccttttattacgtggtcgcggaatgcgcccgacaccgtttaaatacaccttagccattgccctgttacaaacctgcgggatggttggcctggcgcagtgggcgctggtcagcggcggagcggggaaggtggcgatcctgagctataccatgccgttctgggtggtgattttcgccgcggtgtttctcggtgaacgcctgcgacgtgggcaatatttcgcgattctgattgccgctttcggcttatttttggtgttgcagccgtggcaactcgatttctcttcgatgaaaagtgccatgctggcaatcctctccggtgttagttggggggcgagcgcgattgttgctaaacgtctgtatgcccgtcatccgcgcgtggatttattgtcgttaacatcctggcagatgctctatgcggcgctggtgatgagtgtggtcgctttactggtgccgcaacgtgaaattgactggcagcccactgtgttctgggctctggcctacagtgcgattctggcgacggcgttggcgtggagcttatggctgtttgtgctgaaaaacttgcctgccagtattgccagcttaagcacactggccgttcccgtttgcggcgtactcttttcctggtggctgctcggtgagaatccgggggccgttgaangtagcggtattgtgctgattgtgctggcactggcgctggtgagccgtaagaaaaaagaagccgttagtgtaaaaaggatctgaattttttcttcatgtggggcnnnngcntatttaacaaaataacgataatgccccaccatgcgccagctaaacagcacatcttcttcctgcgcacctgcgccaatgttatgtatcaccagcggcgtaccgtcgcgggcgaagccatctgaaaccaccccaatatgtgccagcccgttatctaatcgccaggagacaatatcgcccgcttgatagtcactggggtccttgctgatggggcgtgttttatcgtggcgggtaaaccaggtttccagattaggcacccgacggtgatcgatgttgctgtccgggcgctttaactgccatttttgcgggtactcggcaaaattcttcgccatatcttcgtgcaccagtttctgcaaatcgaccttctggctgcgcaatgcacggatcaccacatcggaacataccccgcgttcttgcgggacatcaccgccaggataggtaagctgcacatacgccggatcgtaaaatagcgtgctgccgatttgctgtctggcaccgtctgcgatggcaaggttggtattgncctggatttgtaccacggttggtggaatggcgggagattttaaggagtagctggtaaatgccgttagcaggctgaccagcgccagtgaagctttcatctgtttcgtccgtgaaaataagagtcacagattcgaccttccgggctaacgattgttctgtagagaaaatgtccagaagcggataaaaaattcctgaacaacgtgggagtttcagattactggcacagagtgccggatgcggcgtgaacgtcttatctggcctaaaaagcacgcaaattcaatatattgcagagattgcgtaggcctgataagcgtagcgcatcaggcaattttgcgttcaaactcccggacaagccgggagtttggagtaggttattcccactcttgcaggaaacgctgaccgtactggtcggctaccagcagagcggcgtaaacctgatctggcgtcgcgccgccaggcatgttgtggatggtttcaccttctgcacatgccgcttctgccacaattcgcattttcgccgggacatcttctttaatatccagttgagcgagagttattggcaaacctaccgcatggctaagcgcagctacggtttcgatttcctcaaccggcgagttttccagtaccagctgcgtcagtgtaccaaatgccactttttcaccgtgataatagtgatgggcatcaggaatggcagtcaggccattatgcaccgcgtgcgctgccgccagaccaccgctttcaaagccaacaccgcttaaataagtgttcgcttcaatcacgcgttccagtgccggagtcactacatgctgttcggcggcgagcatcgctttttcgccttcttccagcaaggtgttgtagcacagttcagccagcgccagcgccgcctgagtgcacttgccgcccgccatggtggtcgcaccgctacgagagcaggcacgcgcttcaaaccaggtcgccagcgcatcgccgatacccgccgctaacagacgcgcaggtgcgcccgcgacgattttagtatcgacaatcaccatattcgggttatttggcagcagcagatagcggtcaaattcaccttcgtcagtgtagataacggaaagagcgctacaaggtgcgtcggttgaagcaatggtcggggcaatggcgaccggaacacccatgaaatgtgccagtgctttggctgtatcgagggtttttccgccaccgataccgagaattgcgccacactgcgcagtctccgcgatgccacgcagacggtcgatctcattttgcgaacattcaccgccaaacggcgcaatttctactaccagtccagcatctttaaagcttttctcgacagtggattgagcaaaacctaaaacaaatttgtcacccaccactaaccagcgttctgccagcggcttcaggtattcgcccagacgattaatcacatcagcgccctggatgtatttacccggtgattgaataatgcggtccataattgctcctttagagatgagtagtgccaaatgcggcattccagtcgtgttcgaacttctctatagctgactctaccgcaggggtgttgagcatttgttgcgctacatctaagggcagggtgatggattcacatcctgccagtaaacagtccagcgcctgacgcggcgttttaaagctnnnngccagcaccatgctttctggtgcgtgcatttctaacagcgcttgcagctcctgaaccgtacgaatgccgtccccgccctgggcatccacgcggttaacatacggagcaacgtattttgcccctgccagtgcggctaataacccttgtgcggcgctatatacagcagtgccaagtgtagtaataccctcttttttcagtattttaattgctgccagaccttcggaagtcaccgggattttcaccacaatgcccggaatggcatcgcgcagacgcttcgcttcttccaccatcccctgcgcgtcgcggctcatggtctgagcaaacagaatgccctcatcaccaatcgctttttgcagacgcggcagcacttcccatatggactccttgctggcagcgataatgctcgggttagttgtcaccccggcaatcgggaatatgtgtgccagacgttcgacttctgcgacgttagcggtgtccagatacagttccatgatgtttccttttacagttccagttcatgttgcagcaggctggcgatagcgtcggcagaggcggcgttaaccagcgcgttacggaattcttcgtgcatgatgcggcgagcgaggcgcgagaaaatgcgcatatgctgatcgcccgcagcgtgtttgttcagggttaacataatgatgaattgcgcttcatcatcgccccagcgcaccggcgcttgcagacgcgntacgctgatggtggattgctcaatgtgttctgatttgctgtggggaatggcaaaactaaagcccagaccggtagagaaaacggcctcgcgcgcccacaagtcggcttccagtttacgcggatagcggcagcggcccgccagcagcaggttatcggtcatgcctttgagcacttcttctttgctgcnccagtcgctttccagtgtgatgcactcggcggtgaccagcggtgcgtcttgttgggtcatgcggaattgcgccagcaggtgttccacttccagcgaagtacggcaggccattgcctggttgagcaacttgcggcactcacggctatcaagttgcgccatccgcgctttcnccgccggaattgatggtgcgctcatgctgagttcatccagccctaagccgaccagcaacggcagcacggaacctttcgctcccagctcaccgcacagaccaatccatttgccctggcgatgcaccgcttgcacggcgtaatcgagcgcccgcaagaatgccggattcaggctgttgtagtgacgagtaaccttagcgttatcgcgatccactgccagcagatattgcgtcaggtcattactaccaatactaaagaaatcaatctcttcgcagcattgatcgatgatgaacatcaccgacggcacttccagcatgatgccgagctggatcttctcatcaaacggaatgtgttcgttacgcagttgctgtttggcttccgccagtttttctttcacccataagatctcttccattgaggagatcatcgggatcatgattttcaggctgccgtgagcagaggcacggaggatcgaccgtagttgtgtggtgaacagcgaggcgtattcttcataaatacgcaccgcgcgataaccgaggaacgggttagcttctgccggaatgttcagataatcaacgggtttgtcaccgccaatatccatagtgcgcacaataatgctgcgtccgttggcggactccagcgcttgacaaaaaatgttgtacaactcgctttcgcccggtgcgctggtgcgatccatatagagcatttcagtgcggaacaaaccgacgccttccgcaccattgccgaatgcggcctgcgcttccacggagtgagcgatgttagcggcaatttcaatgcggataccgtcagcggtacgggcttgttgggtcagccagacacgctgttgctcacgcagggcgtcctgtacgcgggcttcttgctgataataacgagctacggcttcccctggctcaaccacaatcgccccggcgttgccgtcgatataaatcgtttgatgctgccacggagtaagggcatcaatatctacaccaaccagtgtcggaatgttgaacgaacgggcaagaattacggtatgtgaggtggtgccgccacttttcagtaacagacctttgaggtgatttttatccagttcgaggaactggctgggggttagttcatcagccatacaaatggcgggctgcgtcagtttgcccggtgccgggaagcgttgctcaccgtagatttgctgaagcagctggaagcagacatcgcgtacgtccagggcacgttcttgcaggtagctgctgctggaacgggaaaactcttcacaaaagtgattcgcactggcgacaatcgcttcggcgcagcttaatccggcgctgacgcctgccagtaaatgttcgtgcagggaagtatcgccagccagggatcggtgcgcttccagaatcgcgctggtggcaccgtcgctatccagcagacgaaactcaatgtttttcagtaccagcgtcaggccgttttccagtgcggattgctcggcgtcaacgtctttggctgcgggaagattacccagcgcattgagatctaaagaagagatcggcgtcagaatgccgcctgcgctaccgctgcacacggtgcgggcgcggataatttgcggattcagattggtcagtgaaaccggcagtggttccagttcgtcagatttaacttccgccagcggcgcatcgcagtgggggaattcatcgcgcagccattggcttaaacgctggtgcgcttcctgttcgtcggccccggaaatcagtaactggcagttatcgcccgccagcgtgtcggtgccaatcagcgcaagggcgcttttggcgttgcccttgcggtcagtgcgcaggttatgccactcaatttgtgatgaaaaagtattacacagcgtttcaacgtggcttgccggacgtgcatgtacgccgttaggtagctcacaaataaattccacaatcagggccattgcctctctcccggtacggttttctgtttacaggataagagcgcacggcaacggcctgccatgtgacaaatctgccaaaagctggacaaatgtaatgtaaccgtcaatttgcgacgcgtctcacaagacgccgttttgcggcatgcttccggattatcgcaagttatgaggcggatcgcatttttgtactgatattacaaaagtccagtaaatggcctttttatccactgtttgctccgcctgcgattgcctattgtttcctccatcaaaaatatggacatgggctttcgcaagcccgggagcagcttatgaatgagttggtgcagatcctgaaaaatacccgtcagcatttaatgacgggcgtttcacacatgattcccttcgtggtatcgggcggtattttgctggcggtttccgtcatgttgtatggcaaaggcgcagtgccggatgccgtagccgatccgaatctgaaaaaactgtttgatatcggcgttgcaggtttgacgctgatggtgcctttcctcgccgcttacatcggttactccattgcagagcgttctgcgctggctccgtgcgctatcggtgcctgggttggtaacagctttggtgcgggcttctttggtgcactgatcgccgggattatcggcggcatcgtggtgcattacctgaagaaaattccggtgcataaagttctgcgctcggtgatgcccatcttcatcattccgatcgtcggcacactgattaccgcaggcatcatgatgtggggtctgggcgagcctgtaggggcgttgaccaacagcctgactcagtggcttcaggggatgcagcagggcagcattgttatgctggcggtgatcatgggtctgatgctggcgttcgatatgggcggtccggttaacaaagtggcctatgccttcatgctgatttgcgttgctcagggtgtttataccgtggtggccattgctgccgtgggtatttgtatcccgccgctggggatggggctggcgacgctgattggtcgtaaaaatttctccgcagaagagcgcgaaaccggtaaagcggcgctggtgatggggtgcgttggggttactgaaggggcgattcctttcgccgcagccgatccgttacgtgtaattccttccatcatggttggttcagtttgtggtgcagtaactgcggcgctggtcggtgcgcagtgctatgcaggctggggtggtctgattgtgctgccggtggttgaaggtaagttgggttatatcgcagcagtggctgtcggggcggttgtgacggcagtctgcgtgaacgtgctgaaaagtctggcgcgtaaaaatggatcttctactgatgaaaaagaagacgacctggatttggattttgaaattaattaattgaggaacgagccatgacgaaaattattgcagtaaccgcgtgtccatctggtgttgcccatacttatatggctgcagaggcgctggaaagtgccgcgaaagcgaaaggctgggaagtgaaagtagaaacccagggctcgattggtctggaaaacgaactgactgcggaagacgtggcgagcgccgatatggtgattctgactaaagatatcggcatcaagtttgaagagcgttttgctggcaagaccatcgtgcgcgtcaacatcagcgatgcggtaaaacgtgctgatgccattatgagcaaaattgaagctcacctggcgcaaaccgcttaagttcttctcccgctcgcaagggcgggttcgctttcccacaggagttcctcatgacgaatcgtatctctcgcctcaaaactgcactgtttgccaatacccgtgaaatctcgctggagcgtgcgctgctttataccgccagccatcggcaaaccgaaggcgaaccggtgatattgcgccgggcgaaagcaacagcgtatatccttgaacatgttgaaatttcgattcgtgatgaagaactgattgccggtaaccgcaccgtaaaaccgcgcgccgggattatgtcgccggaaatggacccttactggctgctgaaagagctgggtcaattcccgacgcgtccgcaggaccgttttgctatcagcgaagaagataaacgtatctaccgcgaagagttgttcccgtactgggaaaaacgttcgatgaaagatttcatcaacgggcagatgacggatgaagtaaaagccgcgactagcacgcagattttcagcatcaaccagacggataaaggccaggggcacattattattgattacccgcgcctgctgaatcacgggctgggggagctggtggcacagatgcagcaacattgtcagcaacagccggagaatcacttttatcaggcagcgctgttactgctcgaagcctcgcagaaacacattttgcgttacgccgaactggcggaaacgatggcggcaagctgcactgatgcccagcgtcgcgaagaactgttgactattgcggagatctcccgccataacgccgaacataaaccgcagacgttctggcaggcgtgccagttattctggtacatgaacatcattctgcaatacgaatccaacgccagttcgctgtctttagggcgcttcgaccagtatatgttgccgttctatcaggcatctttaacccagggcgaagatccggcgttcctgaaagaactgctcgaatctttatgggtgaaatgcaacgacattgtgctgttgcgctccaccagcagcgcgcgttatttcgcaggtttcccgactggctataccgcactgctcggcgggttaaccgagaacggacgtagcgcggtgaacgtgctttcgttcctctgcctcgatgcctatcaaagcgtacaattaccgcaaccgaacctaggggtgcgcactaacgccttgatcgacacgccgttcctgatgaaaaccgcagaaaccattcgcctcggcaccggtattccgcaaatctttaacgatgaagtggtggtgccagcgttcctcaaccgtggcgtttcgctggaagatgcgcgcgactattccgtagtgggctgtgtggaattatctattcccggcagaacctacggcttgcatgacatcgcgatgtttaatctgctgaaagtgatggaaatctgcctgcatgaaaatgaaggcaatgctgcgctgacttatgaaggtttactggagcagatccgcgccaagatcagccactacatcaccctgatggttgagggcagcaatatttgtgatatcggccatcgcgactgggcacctgtaccgctgctctcgtcttttatcagcgattgtctggaaaaaggtcgcgatattaccgatggcggcgcgcgttataacttctccggcgtacagggaattggtatcgccaacctgagcgattctctccatgcgttgaaagggatggtttttgatcaacagcgtttaagttttgacgaattgctgtcggtattaaaagccaactttgcaacgccagaaggcgaaaaagtccgcgctcgcttaattaaccgctttgagaaatacggtaacgatatcgacgaggtggataacattagcgccgaactgttgcgccactactgcaaagaagtggaaaaataccagaacccgcgcggcggttacttcacgccgggatcgtataccgtttctgctcacgtcccgttgggatcggtggttggcgcgacgccagacggtcgttttgccggagaacagttggcagacggcggcttgtcacccatgctgggccaggacgcacaagggccaacagcggtactgaagtcagtcagtaagctcgataacacgctgctgtctaacggtacgttgctgaacgtgaaattcactccggcgaccctggaaggtgaagcgggattacgcaaactggccgacttcttacgggcgtttacccagcttaagttgcagcatattcagtttaacgtggtgaacgccgacacgttgcgggaagcgcaacagcgcccacaagattatgccgggctggtggtgcgcgttgccggatacagcgccttctttgtcgaactgtcgaaggagatccaggatgacatcatccgccggacagcgcatcagctgtaacgttgtggaaacgcgccgcaatgatgtggcgcgcattttcaacattcagcgttattcactgaatgacggcgagggcattcgtacggtggtcttttttaaaggctgtccgcatctttgcccgtggtgtgctaatccggagtcgatctccggcaaaatccagacggtacgcagagaggcgaaatgtctgcactgtgcgaaatgtttgcgtgatgcggatgaatgcccctccggggcgtttgaacggattggtcgcgatatcagccttgacgcgctggaacgggaagtgatgaaagatgacattttctttcgcacgtccggcggcggcgtcacgctttctggcggcgaagtgttaatgcaggcggagtttgctacccgttttttacagcggctgcggttgtggggcgtgtcatgcgccattgaaactgccggagacgcgccagccagcaagctgttaccgctggcgaaattgtgcgatgaagtgttgttcgatttaaaaattatggacgcgactcaggcgcgggatgtggtgaagatgaacctgccacgcgtgctggagaatctgcgtttgctggtgagtgagggcgtcaacgtgatcccgcgtttaccgctgatccctggtttcacgctcagccgggagaatatgcagcaggcgctggatgtactgatcccgctgaaaatcaggcagatccatctgttaccgtttcatcagtacggcgaaccgaaataccgcctgctggggaaaacatggtcgatgaaagaggtgcctgcgccgtcgtcagccgatgtgacaacgatgcgcgaaatggcagaacgggccggatttcaggttaccgtgggaggttaaaatggcatacctggtggcagtaaccgcctgcgtaagcggcgtggcgcatacatatatggcggcggaacggctggaaaagttgtgcctgttagagaagtggggagtcagcattgaaactcagggcgcgctgggaacggagaatcgtttagcggacgaggatatccgtcgggcggatgttgntctgttgattacggatatcgagcttgccggtgccgagcgatttgaacattgccgctatgtgcaatgcagcatctacgcattcctgcgtgagccgcagcgggtaatgagcgcggtgcgcaaagtgctttctgcgccgcagcaaacccatcttattctggagtagtcggtttttctgtcagttggctgtggtactgccggcgatattccgacggcgagcgttcggtgtttttacgaaacagacggcagaagtagttgctgtcgacaaagccgcaggcgtgcgccacttcttttaccttcaggtcatagcctttcaataacgtcttagcgtgctccagtcgcgtgtgattcaggtattcgttaaaaccaatggcccccgttttttgaaacaggtgcgagagatagtttggtgaaatatagaatgcctgtgcgacagattcgcgggtaagcgcggaggcatagcgttcgtcgatataatcgcgaatagcttcgaatagtgcctggctgcgtgaggcggtctggatttggctgccaagcaaatcgcggcagtggctaagcaggctggcgacgataagccttgccgtttgctgctcctgcggctgcatttgcatttcattgagcgtttgtagcagaaaagaacctatgcgtgggccgcgtcgggcgacgtgttgcttcgccagattttgatattgtttgccatcccattgcacgacgctgaagccgagttgctgtttgccaaacagcacgctaaaggtagtagcaggggcttgccattgtggaaaattccagccaccagcggcaacgtacagcacatcgccgggaactaacgttgctccagcgccggtatcaacaaactcaccttccagcacaatttccagccgtggaaaatcgacctgatacgcaagatcgggcaccgggccgttactgctggcaaagtaaatctggcgcagggacagcgggccgttgatcaggcgggagagcagatagctgacgtcgtgatacatgttattcccttaggtatggagacgggaaaacagtaactggcattattaaaaaaggccacctgaaaagtgtggcctgaggggagttcgatgtaaacattgcggcagttgtattgccggatgtggcgtaaacgccttatccagtctaccgccgcgatctgtaggccggataagacgcgtcaagcgtcgcatccggcaaatagcgcctggctgataattactgattacctacctggtcgccatacggcagcgtgtcgtaatcgatcagcgcgtttttcttgtacgggttaccaatccagcgggtagtttctttgaactgcggattcaccactgaacgggttggatcgtaaccgtcgtaagataagcccgctaaatctgaccaggtgtggatcagttccgcaaggctgtatttacgatcaacatcctgcgagaaatcacgcggatgagtcgcttgccatttttccgacgtccacagcaggaacggaatggtgtacatatgacgcgtcgggttgtcctcattacgcccctgggttttatgaggcggcgtgtcgtaaacctcttcaccgtggtcagagaagtaaaccaggaaaccgttcgggtctgctgctttaaagtctttaatcaggctggcaaccacatgatcgttatacaggttagcgttgtcataatcgttatatgactccagctcttccgcgtttaatcccggcggaacatgatcggtattgccatcaaacttgccctgattttccgggtagcggtatttgtatttgatatgcgtacccagcagatgaacgatgatcagtttcttcggcgcagggtccttcagcacttcctggaacggcttcagcacgttagtgtcgtattcacgcncactctgcgtacgttgctggttcatgtagtactgcttgtcggtctggcgcgaaaataccgtcagcatggtattgcgggcggtcatcgtctgctggttggtgatccagaaggttttataacccgcctgtttcatcatgttcatcagcgacggctgcgtcagatacagatccgggttcttttcattggcaaaggtcagcgcctgttgcaggatttcaatggtgtacggacgagacgtaactacgttattaaacacggtcagattcggatcggttttatgcagcgcattcagctccggcgtggtttcacgcggataaccgtacagactcatgcgtccacgctgggttgactcgccaatcaccagcactaaggtgcgcggttcgttacccgattcatctttgaaattagccagcggcggcaaggcattattttcattcagtagctttgttagcgagtttagttgctgacgatactgataatagccggtcaggaattgccacggtgcggcaggctccatacgcgaggccaggttatccaacgttttctcaaacggcttgtttttgataaacatattcatggcgatcggatgcagaatcaagccataaagcagggcaaaagagacaacataacgccacggctttggaatatagaccgggcgcaggcgtgtccacagcagaactgccaccgccgtataggccagcgcgataagcacaattttcaggctgaaatactggcttaaatactcgctggcttcgttggtgttggtttcgaacatcacaaacagaacgctctgcgagaactcctgaccgtagatgacgtagtagcacagcgccgccagagaggccgcccatagcaccacgccgatcactgcggcaataattttgatccgcttcggaaagaggaataccggaattaaccacagcgagctgaataacagcgagtcgcgaatgccgttggtgccactataaccactgatgtaaataatggcctgtagcagagtagagaaaaaccaaaagtagagcaatgcccaacccagggctttccagctaaaaagaggtttagcctggacttctgtggaatgcatagtaagaacctgtcttgaaaaaaatatcgccgaatttaccgacaattccttaaggatatctgaagggatatccagaatttgaataaaatgcagacagaaatatattgaaaacgagggtgttagaacagaagtatttcagaaaaccctcgcgcaaaagcacgagggtttgtaggagaggaagattagccggtattacgcatacctgccgcaatcccggcaatagtgaccattaacgcctgctcgacgcgaggatccggttcctggccttctttttctgcctggcgggagcggtgcagcaactcggcttgcaatacgttcagcgggtcggtgtaaatattccgtagctgaatagactctgcaatccacggcagatcggccatcagatgggaatcgttggcaatcgccagcaccactttgatgtcttcttcttgcagattgcgtaactctttacctaacggccacagtgttttgtctaccaggcgttggtcatagtattccgccagccacaggtctgctttggcgaagaccatctccagcatgccgagacgcgtcgagaagaatggccaatcgcggcacatagcctccagctcgctctgtttgccatcttcgaccactttttgcagcgccgtacctgcacccagccaggcggggagcatcagacggttttgcgtccaggcgaagatccacggaatggcgcgtagtgactcgacgccgccggttgggcgacgtttcgccggacgtgaacccaacggcagtttgcccagttcctgttccggcgtagcggagcggaagtaaggcacaaaatctttgttttcacgtacgtagccacggtagagatcgcaggagatgactgatagttcatccataatgcgacgccagctctctttcggctcaggtggtggcagcaggttggcttccagaatcgccccggtgtaaagcgacaggctgctgacggtgatttctggcagaccatatttaaagcggatcatctcgccctgttcagtcacgcgcaggccacctttcaggcttcctggcggttgtgacagcagcgccgcatgagcaggtgcgccgccgcgaccaatggaaccgccgcgaccgtggaacaacgtcagctcaatacccgctttttcgcaggttttgattaatgcatcctgtgcctgatattgcgcccaggacgctgccatcacgcccgcatcttttgctgagtcggaatagccaatcatcaccatctgtttgccctgaatcaggccgcgataccagtcgatattcagcaactgagtcatgacatcgttggcgttgttcaggtcatcgagagtttcaaacagcggagcaaccggcatcgcaaacccgatacccgcttctttcagcagcaggtggacagccagcacgtcggacggcgttttcgccatcgagatcacgtaggcggcaatggagccttgcggtgcttcggcaatcacctggcaggtatcgagcacttcgcgcgtttcggcgcttggttgccagttgcgcggcagaagcggacgtttggagttcagttcgcggatcaggaacgcctgtttgtcggcctctgaccagctttcgtagtcgccgataccgaggtagcgggtcagctcgcccagcgcttcggtatgacgcgtgctctcctgacggatatcaatacggaccagcggtacgccgaaacatttcacgcggcgcagggtgtcgagcagatcgccgttggcgataatacccatgccacacgcctgaagtgactggtagcaagcgtagagcggttcccacagttcttcgttttgtgtcagcnggccttctggttttggcagttcttcgcctttcaggcgcgcttccagccatgcctgtgtcgccatcaggcgagaacgcaggtttttcatcagatagcgatacggttctgcggcaccttcttcgccaaccagcgccagcagttcaggggtcgcttcaaccatcgacagttcagaaaccagaacctgaatatctttcaggaacagatcggtggctttccagcggctgagcagcaggacgtggcgggtgatatcggcagtgacgttcgggttgccgtcgcggtcaccgcccatccacgaggtaaaacgtaccggaacaaattcgacgggcagtttgtagccgaggttctcttccagttgttcgttcagttcgcgcaggtaattcggtacgccttgccacaggctgttttctactacggcaaagccccatttggcttcatctaccgggcttggacgcagcttacggatttcatcggtatgccatgactgggcgatcaactggcgcaggcgacgcatcagctggttgtgttcgtagtcagcgatatctttgttatcgagctgttttaagcaggcgttcacttccaccattttgtggatcagtgtacgacgggtaatttcggttgggtgagccgtgaggaccagttccagcgacagcgattccactgcttttttgatggtgtcttcgctcagttccggctggtttttcagtttacgcagggtgcgggcgatcacttccgggttgctggcagcttcgcctttcggcgaaatgctgtggtattgctcggcggtgttggccaggttcaggaactgactaaacgcacgcgcaacgggcagcagctcgtcgttcgacaaattttgtaaggtggtgagtaactcctggcggttagcatcattgccagcgcgtgaagatttggacaacttacggatagtttctacgcgttcaagaatgtgttctcccaacgcatccttgatggtttctcccagcactttgccgagcatacagacattactacgcaatgcggaatattgttcgttcatattaccccagacaccccatcttatcgtttgatagccctgtatccttcacgtcgcattggcgcgaatatgctcgggctttgcttttcgtcgtcttttataaagccacgtaaaagcggtgacgtcaaatgctgcgaaatcgcttcagcaaacgaataaatagcaggaatttacgtcattaaattcacgacgctttaaataagcgtaacttatgggaatgttaaaaaatcgcctcaagtaacaccaaaggtgtaggtcggataagatgtgcaagcatcgcatccgacattattgcggcactggagtttggcaacagtgccggatgcggcgcaagcgccttattcggcctacgttttaatgccagcaaaaatggtgaatgacctgggttatcagttcgcgggtgggcttgataaaccgtgtttccagatattcatcaggctgatgagcctgattaattgagccaggccccagaaccagcgtcgggcataacgtttgaataaacggcgcttcggtacagtaattcaccacttcggtttttgctccgagcaatttctcaaccacttcaaccagttgatgattcggtgggcattcatagccagggatcggcggatgcagctcgtcgaccgtcagacgacccggccagcgttcgctcaccggagccaatgcatcgttgagcaaaccattaagttcattgagtgtcatgccaggcagcggacgaatatccatatgcaactcacaccaagcgcaaatacggttagaagcgtcgccaccgtgaatatgcccgaggttgagcgtagggtatggcacggtaaacgcttcgtagtgataacgttctttcaggttatcgcgcaattgcanaatatgcccgatggcgtcgtgcattagttctatagcgttaactccgcgtgctggatcgctggagtgccccgactggccctgaatacggatggcgttagagatatgacctttatgtgcgcgtaccggttgtagtgacgtcggttcgccaatgatggcgcaatccgggcgcagggcggtagtttcggcaaaataacgcgctccggccatactggtttcttcatcagcagtcgccagaatgtagagcggttttttcagtttcgtgacgtngacatcgcgtagcgcatcaaggataaacgcaaaaaagcctttcatgtcggcggtgcctaagccgtaaagcttgccgtcatgctccgtcagtgtaaacggatcgcgcgtccagcgaccgtcatcaaatggcaccgtatcggtatgccccgccagcaacaagccgccagccccctgtccggtacttgccagcatattaaatttgttgcgagttcctggtacaggctgcacttccacattgaagcctaaatctttaaaccagtccgccagcagagtgattaaatctgcattgctttgatcgagtgcctcttccgtggcgcttattgaaggtgtggcaatcagagcacggtaaatctcgataaatggcggtaatttgtttttcattgttgacacacctctggtcatgatagtatcaatattcatgcagtatttatgaataaaaatacactaacgttgagcgtaataaaacccaccagccgtaaggtgaatgttttacgtttaacctggcaaccagacataagaaggtgaatagccccgatgttgaatacgctgattgtgggtgccagcggctacgctggcgcagagctagtgacctgtgtaaatcgccatccgcatatgaacataaccgctttgactgtttcagcgcaaagcaatgatgcgggaaagttaatctccgatttgcatccgcagctaaaaggcatcgttgatctgccgttgcagccgatgccggatatcagcgagtttagccctggggtggacgtggtgtttctcgccaccgcccatgaagttagccacgatttagcgccgcagtttcttgacgcgggctgcgtggtgttcgacctttccggcgcgtttcgtgttaacgacgccaccttctatgaaaaatattacggctttacccatcaatacccggaactgctggaacaggcagcctacggtctggcggagtggtgcggtaataaattaaaagaagcgaatttgattgcggtgccaggctgttatccgacggcagcacagttggcgctgaaaccgttgattgatgccgatcttcttgacctcaatcagtggccggtgatcaacgccaccagcggcgtgagcggtgcaggacgtaaggcagcgatttcaaatagtttttgtgaagttagcctgcaaccgtatggcgtctttacccatcgccatcaaccagagatcgccacacacctcggtgctgacgttatcttcaccccgcatctgggcaatttcccgcgcggcattctcgaaaccattacctgccgcctgaaaccgggtgtgacccaggcgcaagtggcgcaagcgttacagcaggcgtatgcccataaaccgctggtgcggctgtatgacaaaggcgttccggcgctgaaaaatgtcgttgggctaccattttgcgatatcgggtttgccgttcagggcgaacatctgattattgtggcgaccgaagacaacttactgaaaggcgcggcggcacaagcggtacagtgcgccaatattcgtttcggctatgcggaaacgcagtctcttatttaagggtgcaatgatgaatccattaattatcaaactgggtggcgtactgctggatagtgaagaggcgctggaacgtctgtttagcgcactggtgaattatcgtgagtcacatcagcgtccgctggtgattgtgcacggcggcggttgcgtggtggatgagctgatgaaagggctgaatctgccggtgaaaaagaaaaatggcctgcgggtgacgcctgctgatcagattgacattatcaccggagcactggcgggaacggcaaataaaaccctgttggcatgggcgaagaaacatcagattgcggccgtaggtttgtttctcggtgacggcgacagcgtcaaagtgacccagcttgatgaagagttaggtcatgttggactggcgcagccaggttcgcctaagcttatcaactccttgctggagaacggttatctgccggtggtcagctccattggcgtaacagacgaagggcaactgatgaacgtcaatgccgaccaggcggcaacggcgctggcggcaacgctgggcgcggatctgattttgctctccgacgtcagtggcattctcgacggcaaagggcaacgcattgccgaaatgaccgccgcgaaagcagaacaactgattgagcagggcattattactgacggcatgatagtgaaagtgaacgcggcgctggatgctgcgcgcacgttgggccgtccggtagatatcgcctcctggcgtcatgcggagcagcttccggcactgtttaacggtatgccgatgggtacgcggattttagcttaagttttgttggccggaggcgcagctttccggcattgaatttcaaaataaggaaacagagttatggcactttggggcgggcgttttacccaggcagcagatcaacggttcaaacaattcaacgactcactgcgctttgattaccgtctggcggagcaggatattgttggctctgtggcctggtccaaagccctggtcacggtcggcgtgttaaccgcagaagagcaggcgcaactggaagaggcgctgaacgtgctgctggaagatgttcgcgccaggccacaacaaatccttgaaagcgacgccgaagatatccatagctgggtggaaggcaaactgatcgacaaagtgggccagttaggcaaaaagctgcataccgggcgtagtcgtaatgatcaggtagcgactgacctgaaactgtggtgcaaagataccgttagtgagttactgacggctaaccggcagctgcaatcggcgctggtggaaaccgcacaaaacaatcaggacgcggtcatgccaggttacactcacctgcaacgcgcccagccggtgacgttcgcgcactggtgcctggcctatgttgagatgctggcgcgtgatgaaagccgtttgcaggatgcgcttaagcgtctggatgtcagcccgttaggttgtggcgcgctggcgggaacggcttatgaaatcgaccgtgaacagttagcgggctggctgggatttgcttcagcaacccgtaacagtctcgacagcgtttctgaccgtgaccacgtgctggaactgctttctgctgccgctatcggcatggtgcatctgtcgcgttttgctgaagatctgattttctttaacaccggcgaagcggggtttgtggagctttctgaccgcgtgacttccggttcatcattaatgccgcagaagaaaaacccggatgcgctggagctgattcgcggtaaatgcggtcgggtgcagggcgcgttaaccggcatgatgatgacgctgaaaggtttgccgctggcttacaacaaagatatgcaggaagacaaagaaggtctgttcgacgcgctcgatacctggttggactgcctgcatatggcggcgctggtgctggacggcattcaggtgaaacgcccgcgttgccaggaagcggcgcaacagggttacgcgaacgccactgaactggcggattatctggtggcgaaaggtgtgccgttccgcgaggcacaccatattgtgggtgaagctgtggtggaagccattcgtcagggcaaaccgctggaggagctgccgctcaccgagttgcagaaatttagtccggtgattggtgaagatgtctatccgattctgtcgctgcaatcgtgcctcgacaagcgtgcggcaaaaggcggcgtctcaccacagcaggtggcgcaggcgattgcttttgcaagggcgcggttggggtaagaacatttatatgtacaaatttgagcctggcttatcgccgggcttttttatggcaaaaaaaagcggatcctggagatccgcaaaagttcacgttggctttagttattcgagttgagaaactctcgaaacgggcagtgacttcaagggttaaaagaggtgccgctccgtttctgtgagcaattatcagtcagaatgcttgatagggataatcgttcattgctattctacctatcgccatgaactatcgtggcgatggaggatggataatgaatattcgtgatcttgagtacctggtggcattggctgaacaccgccattttcggcgtgcggcagattcctgccacgttagccagccgacgcttagcgggcaaattcgtaagctggaagatgagctgggcgtgatgttgctggagcggaccagccgtaaagtgttgttcacccaggcgggaatgctgctggtggatcaggcgcgtaccgtgctgcgtgaggtgaaagtccttaaagagatggcaagccagcagggcgagatgatgtccggaccgctgcatattggtttgattcccacggttggaccgtacctgctaccgcatattatcccgatgctgcaccagacctttccaaagctggaaatgtatctgcatgaagcacagacccaccagttactggcgcaactggacagcggcaaactcgattgcgtgatcctcgcgctggtgaaagagagcgaagcattcattgaagtgccgttgtttgatgagccaatgttgctggctatctatgaagaccacccgtgggcgaaccgcgaatgcgtaccgatggccgatctggcaggggaaaaactgctgatgctggaagatggtcactgtttgcgcgatcaggcaatgggtttttgctttgaagccggggcggatgaagatacacacttccgcgcgaccagcctggagacgctgcgcaacatggtggcggcaggtagcgggatcactttactgccagcgctggctgtgccgccggagcgcaaacgcgatggggttgtttatctgccgtgcattaagccggaaccacgccgcactattggcctggtttatcgtcctggctcaccgctgcgcagccgctatgagcagctggcagaggccatccgcgcaagaatggatggccatttcgataaagtgttaaaacaggcggtttaaaccgtttaacgcagctacccgataggcttccgccatcgtcgggtagttaaaggtggtgttgacgaagtactcaatagtgttgccgccacctttctgttccataatcgcctgaccgatatgaataatttcggcagcgcgctcgccaaagcagtgaatgcccagaatctcttttgtttcccgatggaacaaaattttcagcgtgcccacgttcatgccgacgatttgtgcacgtgccagatgtttgaactgggcgcggcccacttcatatggcactttcatcgcggtcagctgctgttcggttttgcccacagagctgatttccgggatggtgtaaatgccggtagggatatcttcaatcagatgcgcggtggcttcgccttttaccagcgcctgcgcggcaatgcgcccctggtcataggccgctgatgccaggctcggataaccaatcacgtcgcccaccgcgtaaacgtgcggctgtgcggtctgatacatgctgttgaccttcagctgtccgcgactgtcagtttccagcccaatgttctgtaacgccagcgaatcggtattaccggtacgaccgttggcatagagcaggcagtcagctttcagttttttacccgacttcagatgcatgatcacaccgtcgtcacagccttcgatcttctcgtactcttcgttgtgacgaatcactacgccactgttccagaagtgataggagagagaatctgacatctcttgatcgagaaatgccagcaggcgatcgcgggtgttgatcagatccacttttacatccataccgcggaagatcgacgcatattcacagccgatcactccagcaccatagataagtacatggcgcggttcgtggtgcatgctgagaattgagtcgctgtcgtaaatgcgtggatgggtgaaatcaacatctgttggatgatatggacgagagccgcaggcaataacaaatttttcagcggttagtgtttcaacgctgccgtccgggcaatccagcgccaacgtatgctcgtcaacaaagcgagcgttcccctgcaatatttcacagtgattacgttcgtaaaatccctgacgcatgcgcgtttgttgattaatcacgttatcggcatggttaaggatatcggcaaaagaagagcggagcagtcgggaatggtcgctgtatagtgggttttgattgaattctataatgcggctgacggcgtgacggagagctttcgacgggatggtgccccagtgggtgcaaccgccgccaacattttgataacgctcgataactgcgacgcgcgcaccttgcttaaccaggcccattgcagcgccttcgccgccggggccggaacctattactatggcatcgtaatcgtaggaatgtggcatggtagggcttacctgttcttatacataaaagcaacagaatggtaacattttatcgcgggtaagccaattgatccccgtcattaatctggctatagcgtgagcggcctttgctttgtctgcctccttcttaacccatttattcactattaatcgctttttattatggctgatagttttatcttgccgaagcgtgcttttttgttattgtctttgtgaaatattcttataaaacaaanatataaatattttatattgatgagttatttgtatttacaccatcaataaaatccgttaattagcctgtttataagtgaataaaggaatagccgatgatcgaacactatattcgagggtttgaggaagaactgcgtgagatccgccatcagatccacgaaaacccggagctgggattacaagaatttaaaaccagtgctttggttgcggaaaagctgcgtcagtggggctatgaagtagagcaaggactggcgacgacggggatagtggccacgttaaaagtgggcgacggagagaaaagtattggcctgcgggcggatatggatgcgctgccgatttatgaaaatagtggcaagccctgggccagtaaacatcctggtttaatgcacgcctgcgggcatgacgggcataccaccatactgctgggggccgcgcgttattttgccgaaacccgccgttttaacggcacgttacgtcttatcttccagcctgcggaagagatgattaatggcggtgagatcatggttaaagaggggctttttgatcatttcccctgcgatgtcattttcggcatgcataacatgcccggtctgccggtgggtaagttttatttccagccaggggcactgatggcgtcaatggatcagttccatattacagttcgtggttgtggcggacacggtgcgatcccgcacaaagccatcgatccggtgctagttgccgcacatatcaccaccgcattacaaagcattgtgttacgcaatgtcgatccgctggaagcggcggtaattaccgtcggcagcattgttgcgggtgaggcggctaacgtcattcctgacagtgctgagatgaaaatcagcgtccgctctcttagccgcgatacccgacaacttcttctgacccgtattcctgctctggcacaagcccaggctgccagctttggcgctacggctgaggttacgcatgttaacggtacaccagtattagtaaatgacgaggagatggcgcgcttcgcctggcaggtggcgtgtaaaacgtttggtgaagatcgggccgagtttggcatcaagcctctgatgggcagtgaagatttctctttcatgctggaagcccaacccaaaggcggtttcctgttattcggtaatggcgatgtcggggaaggttcctgcatggtgcataacccgggttacgacttcaacgatgcaagtctggtcccggcaagcagctactggggcgcactggtagaagcctggctgcaataaataaaacaacacacaacaacactttttggcaaggaacatggaatgacggcgatcgtaaatgaaaccgtgagtgtgaagaaaaagcccagcggcaggcgggtgatttttgcctcggcgtttggcaatgcgctcgaattttttgattttggcgtttacaacttttttgtggtctatatcagcacgctattttttccgcccagtgcagataaaaacgtcgcgctactgctggcgtttgccactttcggcgtgagcttttttatgcgcccgctcggcggcattattgtgggggcctgggccgatcgtttcggacgcaaacccgcgatggtgttcaccattgcgctgatgagtcttggtacactgatgatcggcatcgcaccgacgtatgaaacggcgggctattggggaaccgcgacgctggtgctagcgcgtctaattcagggcgttgcggcaggaggcgaagtcggtgcctcaatgtctttgttggttgaatcagctccggcaaatcgtcgcggtttttacagcagttggtcactggcgactcaaggcctggcaacaacttttggaggtgttgtcgctttaggtttaagtgcatggctgccctttgcgaccggttcagaaatcgtcatggctgaatggggctggcgtgtgccgttttttattggcgtgttattagcgcctgtcggctgttggttgcgtttgagtctggaaaatgatgttcctgagccagcacataataagaaggccgcagccagcgaaagcgccttctccttacttatgcaacataaagcgactatcgctaacggtatcttgctcgctattggtagtacagtcgcaacctatatctccctcttttattacggtacatgggcggcgaagtatttaggaatgaaccaaaactattctcatgcagcgatgttactggcgggcgttattacgtttgtgggtgcgctgctggtggggatgttgtgcgattcggtcgggcgtaaaaagctgattttaatctcccgtgtgatggtgctgatctgtagctggccgtcattctggctgttggtgaattacccaagcccaggcatgttgctgacggtggttttcgtgatggtcagctttaccacgcttggcgctgtgccagtgatgttgttgatctctgaactgttgccgaaacggattcgggcattgggttttgcgctggtttatagcattggtgtggcaatctttggcggttttgctcaatatttcgctacgcaatccatcgtgttgctggatagtttgacggctccggcgtggtatctgggtggaggcacgttgctgtcgatgttggcgttgttgtacgtaaaagaaccggccaaagaattgcagtaaatatgttttattgcgttaccgttcattcacaatactggagcaatccagtatgttcattctctggtatagtgccagcagtacttttggcaaggattcagacatcgtgatgggcgtaagagcgcaacaaaaagaaaaaacccgccgttcgctggtggaagccgcatttagccaattaagtgctgaacgcagcttcgccagcctgagtttgcgtgaagtggcgcgtgaagcgggcattgctcccacntctttttatcggcatttccgagacgtagacgaactgggtctgaccatggttgatgagagcggtttaatgctacgccaactcatgcgccaggcgcgtcagcgtatcgccaaaggcgggagtgtgatccgcacctcggtctccacatttatggagttcatcggtaataatcctaacgccttccggttattattgcgggaacgctccggcacctccgctgcgtttcgtgccgccgttgcgcgtgaaattcagcacttcattgcggaacttgcggactatctggaactcgaaaaccatatgccgcgtgcgtttactgaagcgcaagccgaagcaatggtgacaantgtcttcagtgcgggtgccgaggcgttggacgtcggcgttgaacaacgtcggcaattagaagagngactggtactgcaactgcgaatgatttcgaaaggggcttattactggtatcgccgtgaacaagagaaaaccgcaattattccgggaaatgtgaaggacgagtaatgaaacaagcaaatcaagatagaggtacgctgctgctggcgttggttgctggcttatcgattaatggtactttcgcagcgctgtttagctccattgtgccattttctgtattcccgattatttccctggtgctgacggtttactgcctgcatcaacgttatcttaatcgcaccatgccggtaggcttgccgggtctggcagctgcctgttttattctcggcgtactgctgtacagcacggtagttcgtgcggaatatccggatatcggctctaacttcttcccggcagtactctccgtcattatggtgttctggattggcgcgaagatgcgtaaccgtaagcaggaagttgctgagtaatcggtatcatgccggatgctggcgcatccggcatgggttttacttcgcggtcagtaatacgccgcactccatatggtgcgtgtaggggaactgatcaaacagagccagacgttcgaccttgtgcgtctggcttaatgtttccagatttttgcataacgtttccggattgcaggagatatacagaatacgtggatacgcctgcaccattttctcggtttcactgtccagaccgctgcgaggtgggtcgacaaaaatggtttcgcactgataactctttaagtcgatcccttgcaggcggttaaactcgcgcacgccattcatcgcctgagtaaattcttctgccgccatacgaataatttgtacgttatcaatatggttagcggcaatgttgtattgcgcggcagcgactgatggcttggcgatttcggtggctaatacccgatcaaaattgcgcgccagcgctaatgagaagttaccgttgccgcagtacagctccagtaaatcgccttttgagcctttggttacgtccagcgcccattccagcatctgaatattcatcgccgcgttcggctgggtaaagctgttttctacctgacgatagatcatctctttccctgcgaccggcagacgctcgtcgatgtaatcttgatccagcgcgattttggttttcgttgcccgaccaatcagatgcacattcagattctg

SEQ ID NO: 1641 - DNA, 4743 bp, Escherichia coli
  Strain O55:H7
  modified_base (1125)..(1125): a, c, g or t
  modified_base (3475)..(3476): a, c, g or t
  modified_base (4314)..(4314): a, c, g or t
  modified_base (4352)..(4352): a, c, g or t
cagtgcatcgcgcagggcttccgcttcctgacgccactcatcatccagctttttatggtacagcagggaaaccaccgcctgattactcagcgtggtgaggtaatcaatctggaacaacttgtggcgcagaacgggattattacgcacacccgcaatcatcgccgtcatcaactggttgatgagttcactggcggcggggaagctatccacccggatacggcttttggtttgttgatcgaaaatgatgtggtacaggtcatcgccatcgtgccagatgcggaactccgcacgcatccggtaatgactgaccggcgagcgaaacacttccggaaccaggtcagaaaacggtgccatcatactttgcaaacgtaccactttttcggctaactgcgcttcatactgttctgttggaaggtgttcgggggtcatgatgtatcctgaaaaattaaagtacgcggcgattgtagggattgctcatcagatgtccagatcttgatgaattcctatttgtgagctacgtctggacagtaacttgttacaacctgtagcatccacttgccggtcctgtgagttaatagggaatccagtgcgaatctggagctgacgcgcagcggtaaggaaaggtgcgatgattgcgttatgcggacactgccattcggtgggaagtcatcatctcttagtatcttagatacccctccaagcccgaagacctgccggccaacgtcgcatctggttctcatcatcgcgtaatattgatgaaacctgcggcatccttcttctattgtggatgctttacaatgattaaaaaagcttcgctgctgacggcgtgttctgtcacagccttttccgcttgggcacaggataccagcccggatactctcgtcgttactgctaaccgttttgaacagccgcgcagcactgtgcttgcaccaaccaccgttgtgacgcgtcaggatatcgaccgctggcagtcgacctcggttaatgatgtgctgcgccgtcttccgggcgtcgatatcacccaaaacggcggttcaggtcagctctcatctatttttattcgcggtacaaatgccagtcatgtgttggtgttaattgatggcgtacgcctgaatctggcggggntgagtggttctgccgaccttagccagttccctattgcgcttgtccagcgtgttgaatatatccgtgggccacgctccgccgtttatggttccgatgcaataggtggggtggtgaatatcatcacgacgcgcgatgaacccggaacggaaatttcagcagggtggggaagcaatagttatcaaaactatgatgtctctacacagcaacaactgggggataagacacgagtaacgttgttgggcgattatgcccatactcatggttatgatgttgttgcctatggtaataccggaacgcaagcgcagccagataacgatggttttttaagtaaaacgctttatggcgcgctggagcataactttactgatgcctggagcggctttgtgcgcggctatggctatgataaccgtaccaattatgacgcgtattattctccgggttcaccattggtcgatacccgtaaactctatagtcaaagttgggacgccgggctgcgatataacggcgaactgattaaatcacaactcattaccagctatagccatagcaaagattacaactacgatccccattatggtcgttatgattcgtcggcgacgctcgatgagatgaagcaatacaccgtccagtgggcaaacaacatcatcattggccacggtaatgttggtgcgggtgttgactggcagaagcagagcacggcaccgggcacagcttatgttaaggatggatatgatcaacgtaataccggcatctatctgaccgggctgcaacaagtcggcgattttacctttgaaggcgcagcacgcagcgacgataactcacagtttggtcgtcatggaacctggcaaaccagcgccggttgggaattcatcgaaggttatcgcttcattgcttcctacgggacatcttataaggcaccaaatctggggcaactgtatggcttctacggaaatccgaatctggacccggagaaaagcaaacagtgggaaggcgcgtttgaaggcttaaccgctggggtgaactggcgtatttccggatatcgtaacgatgtcagtgacttgatcgattatgatgatcacaccctgaaatattacaacgaagggaaagcgcggattaagggcgtcgaggcgaccgccaattttgataccggaccactgacgcatactgtgagttatgattatgtcgatgcgcgcaatgcaattaccgacacgccgttgttacgccgtgctaaacagcaggtgaaataccagctcgactggcagttgtatgacttcgactggggtattacttatcagtatttaggcactcgctatgataaggattactcatcttatccttatcaaaccgttaaaatgggcggtgtgagcttgtgggatcttgcggttgcgtatccggtcacctctcacctgacagttcgtggtaaaatagccaacctgttcgacaaagattatgagacagtctatggctaccaaactgcaggacgggaatacaccttgtctggcagctacaccttctgaaccacgtcccaccgtgctggtgtttgactccggcgtcggtgggttgtcggtctatgacgagatccggcatctcttaccggatctccattacatttatgctttcgataacgtcgctttcccgtatggcgaaaaaagcgaagcgtttattgttgagcgagtggtggcaattgtcaccgcggtgcaagaacgttatccccttgcgctggctgtggtcgcttgcaacactgccagtaccgtttcacttcctgcattacgcgaaaagttcgacttcccggttgttggtgtcgtgccggcgattaaacctgctgcacgtctgacggcaaatggcattgtcggattactggcaacccgcggaacagttaaacgttcttatactcatgagctgatcgcgcgtttcgctaatgaatgccagatagaaatgctgggctcggcagagatggttgagttggctgaagcgaagctgcatggcgaagatgtttctctggatgcactaaaacgtatcctacgcccgtggttaagaatgaaagagccgccagataccgttgtattgggttgcacccatttccctctactacaagaagaactgttacaagtgctgccagagggaacccggctggtggattctggcgcagcgattgctcgccgaacggcctggttgttagaacatgaagccccggatgcaaaatctgccgatgcgaatattgccttttgtatggcaatgacgccagaagctgaacaattattgcccgttttacagcgttacggcttcgaaacgctcgaaaaactggcagttttaggctgatttggttgaatgttgcgcggtcggaaaattnntttaaatttcctcttgtcaggccggaataactccctataatgcgccaccactgacacggaacaacggcaaacacgccgccgggtcagcggggttctcctgagaattccgacagagaaagcaaaaataaatgcttgactctgtagcgggaaagcgtaatatacgccacctcgcgacagtgagctgaaagccgcgtcactgctctttaacaatttatcagacaatctgtgtgggcactcgaagatacggattcttaacgtcgcaagacgaaaaatgaataccaagtctcaagagtgaacacgtaattcattacgaagtttaattctttgagcatcaaacttttaaattgaagagtttgatcatggctcagattgaacgctggcggcaggcctaacacatgcaagtcgaacggtaacaggaagaagcttgcttctttgctgacgagtggcggacgggtgagtaatgtctgggaaactgcctgatggagggggataactactggaaacggtagctaataccgcataacgtcgcaagaccaaagagggggaccttcgggcctcttgccatcggatgtgcccagatgggattagctagtaggtggggtaacggctcacctaggcgacgatccctagctggtctgagaggatgaccagccacactggaactgagacacggtccagactcctacgggaggcagcagtggggaatattgcacaatgggcgcaagcctgatgcagccatgccgcgtgtatgaagaaggccttcgggttgtaaagtactttcagcggggaggaagggagtaaagttaatacctttgctcattgacgttacccgcagaanaagcaccggctaactccgtgccagcagccgcggtaatncggagggtgcaagcgttaatcggaattactgggcgtaaagcgcacgcaggcggtttgttaagtcagatgtgaaatccccgggctcaacctgggaactgcatctgatactggcaagcttgagtctcgtagaggggggtagaattccaggtgtagcggtgaaatgcgtagagatctggaggaataccggtggcgaaggcggccccctggacgaagactgacgctcaggtgcgaaagcgtggggagcaaacaggattagataccctggtagtccacgccgtaaacgatgtcgacttggaggttgtgcccttgaggcgtggcttccggagctaacgcgttaagtcgaccgcctggggagtacggccgcaaggttaaaactcaaatgaattgacgg

SEQ ID NO: 1642 - DNA, 1086 bp, Escherichia coli
  Strain O55:H7
  modified_base (626)..(626): a, c, g or t
cgcacaagcggtggagcatgtggtttaattcgatgcaacgcgaagaaccttacctggtcttgacatccacagaactttccagagatggattggtgccttcgggaactgtgagacaggtgctgcatggctgtcgtcagctcgtgttgtgaaatgttgggttaagtcccgcaacgagcgcaacccttatcctttgttgccagcggtccggccgggaactcaaaggagactgccagtgataaactggaggaaggtggggatgacgtcaagtcatcatggcccttacgaccagggctacacacgtgctacaatggcgcatacaaagagaagcgacctcgcgagagcaagcggacctcataaagtgcgtcgtagtccggattggagtctgcaactcgactccatgaagtcggaatcgctagtaatcgtggatcagaatgccacggtgaatacgttcccgggccttgtacacaccgcccgtcacaccatgggagtgggttgcaaaagaagtaggtagcttaaccttcgggagggcgcttaccactttgtgattcatgactggggtgaagtcgtaacaaggtaaccgtaggggaacctgcggttggatcacctccttaccttaaagaagcgtnctttgcagtgctcacacagattgtctgatagaaagtgaaaagcaaggcgtcttgcgaagcagactgatacgtccccttcgtctagaggcccaggacaccgccctttcacggcggtaacaggggttcgaatcccctaggggacgccacttgctggtttgtgagtgaaagtcgccgaccttaatatctcaaaactcatcttcgggtgatgtttgagatatttgctctttaaaaatctggatcaagctgaaaattgaaacactgaacaacgagagttgttcgtgagtctctcaaattttcgcaacacgatgatgaatcgaaagaaacatcttcgggttgtgaggttaagcgactaagcgtacacggtggatgccctggcagtcagaggcgatgaaggacgtgctaatctgcgataagcgtcggtaaggtgatatgaaccgttataaccggcgatttccgaatg

SEQ ID NO: 1643 - DNA, 393 bp, Escherichia coli
  Strain O55:H7
  modified_base (5)..(5): a, c, g or t
  modified_base (108)..(108): a, c, g or t
  modified_base (219)..(219): a, c, g or t
  modified_base (386)..(386): a, c, g or t
ttcgncacactatcattaactgaatccataggttaatgaggcgaaccgggggaactgaaacatctaagtaccccgaggaaaagaaatcaaccgagattcccccagtancggcgagcgaacggggaggagcccagagcctgaatcagtgtgtgtgttagtggaagcgtctggaaaggcgcgcgatacagggtgacagccccgtacacaaaaatgcacatnctgtgagctcgatgagtagggcgggacacgtggtatcctgtctgaatatggggggaccatcctccaaggctaaatactcctgactgaccgatagtgaaccagtaccgtgagggaaaggcgaaaagaaccccggcgaggggagtgaaaaagaacctgaaaccgtgtangtacaag

SEQ ID NO: 1644 - DNA, 1340 bp, Escherichia coli
  Strain O55:H7
  modified_base (199)..(199): a, c, g or t
  modified_base (1015)..(1015): a, c, g or t
  modified_base (1078)..(1078): a, c, g or t
tgactgcgtaccttttgtataatgggtcagcgacttatattctgtagcaaggttaaccgaataggggagccgaagggaaaccgagtcttaactgggcgttaagttgcagggtatagacccgaaacccggtgatctagccatgggcaggttgaaggttgggtaacactaactggaggaccgaaccgactaatgttgaaanattagcggatgacttgtggctgggggtgaaaggccaatcaaaccgggagatagctggttctccccgaaagctatttaggtagcgcctcgtgaattcatctccgggggtagagcactgtttcggcaagggggtcatcccgacttaccaacccgatgcaaactgcgaataccggagaatgttatcacgggagacacacggcgggtgctaacgtccgtcgtgaagagggaaacaacccagaccgccagctaaggtcccaaagtcatggttaagtgggaaacgatgtgggaaggcccagacagccaggatgttggcttagaagcagccatcatttaaagaaagcgtaatagctcactggtcgagtcggcctgcgcggaagatgtaacggggctaaaccatgcaccgaagctgcggcagcgacactgtgtgttgttgggtaggggagcgttctgtaagcctgtgaaggtgtgctgtgaggcatgctggaggtatcagaagtgcgaatgctgacataagtaacgataaagcgggtgaaaagcccgctcgccggaagaccaagggttcctgtccaacgttaatcggggcagggtgagtcgacccctaaggcgaggccgaaaggcgtagtcgatgggaaacaggttaatattcctgtacttggtgttactgcgaaggggggacggagaaggctatgttggccgggcgacggttgtcccggtttaagcgtgtaggctggttttccaggcaaatccggaaaatcaaggctgaggcgtgatgacgaggcactacggtgctgaagcaacaaatgccctgcttccaggnaaagcctctaagcatcaggtaacatcaaatcgtaccccaaaccgacacaggtggtcaggtagngaataccaaggcgcttgagagaactcgggtgaaggaactaggcaaaatggtgccgtaacttcgggagaaggcacgctgatatgtaggtgaagtccctcgcggatggagctgaaatcagtcgaagataccagctggctgcaactgtttattaaaaacacagcactgtgcaaacacgaaagtggacgtatacggtgtgacgcctgcccggtgccggaaggttaattgatggggtcagcgcaagcgaagctcttgatcgaagccc

SEQ ID NO: 1645 - DNA, 21258 bp, Escherichia coli
  Strain O55:H7
  modified_base (120)..(120): a, c, g or t
  modified_base (11520)..(11520): a, c, g or t
  modified_base (13255)..(13255): a, c, g or t
  modified_base (14585)..(14585): a, c, g or t
  modified_base (16208)..(16208): a, c, g or t
  modified_base (19807)..(19807): a, c, g or t
  modified_base (21020)..(21020): a, c, g or t
cggccgtaactataacggtcctaaggtagcgaaattccttgtcgggtaagttccgacctgcacgaatggcgtaatgatggccaggctgtctccacccgagactcagtgaaattgaactcnctgtgaagatgcagtgtacccgcggcaagacggaaagaccccgtgaacctttactatagcttgacactgaacattgagccttgatgtgtaggataggtgggaggctttgaagtgtggacgccagtctgcatggagccgaccttgaaataccaccctttaatgtttgatgttctaacgtggacccgtgatccgggttgcggacagtgtctggtgggtagtttgactggggcggtctcctcctaaagagtaacggaggagcacgaaggttggctaatcctggtcggacatcaggaggttagtgcaatggcataagccagcttgactgcgagcgtgacggcgcgagcaggtgcgaaagcaggtcatagtgatccggtggttctgaatggaagggccatcgctcaacggataaaaggtactccggggataacaggctgataccgcccaagagttcatatcgacggcggtgtttggcacctcgatgtcggctcatcacatcctggggctgaagtaggtcccaagggtatggctgttcgccatttaaagtggtacgcgagctgggtttagaacgtcgtgagacagttcggtccctatctgccgtgggcgctggagaactgaggggggctgctcctagtacgagaggaccggagtggacgcatcactggtgttcgggttgtcatgccaatggcactgcccggtagctaaatgcggaagagataagtgctgaaagcatctaagcacgaaacttgccccgagatgagttctcctgaccctttaagggtcctgaaggaacgttgaagacgacgacgttgataggccgggtgtgtaagcgcagcgatgcgttgagctaaccggtactaatgaaccgtgaggcttaaccttacaacgccgaaggtgttttggcggatgagagaagattttcggcctgatacagattaaatcagaacgcagaagcggtctgataaaacagaatttgcctggcggccgtagcgcggtggtcccacctgaccccatgccgaactcagaagtgaaacgccgtagcgccgatggtagtgtggggtctccccatgtgagagtagggaactgccaggcatcaaattaagcagaaggcccggtcggaagactgggcctttttgcgtttctacaaactctccctgtcgtcataactacaagccatccccccacagatacggtaaactagcctcgtttttgcatcaggaaagcagctatgaaccactccttaaaaccctggaacacatttggcattgatcataatgctcagcacattgtatgtgccgaagacgaacaacaactactcaatgcctggcagcatgcaaccgcagaagggcaacccgttcttattctgggtgaaggaagtaatgtactttttctggaagactatcgcggcacggtgatcatcaaccggatcaaaggtatcgaaattcatgatgaacctgatgcgtggtatttacatgtaggagccggagaaaactggcatcgcctggtaaaatacactttgcaggaaggtatgcctggtctggaaaatctggcattaattcctggttgtgtcggctcatcacctatccagaatattggtgcttatggcgtagaattacagcgagtttgcgcttatgttgattgtgttgaactggcgacaggcaagcaagtgcgcttaactgccaaagagtgccgttttggctatcgcgacagtatttttaaacatgaataccaggaccgcttcgccattgtagccgtaggtctgcgtctgccaaaagagtggcaacctgtactaacgtatggtgacttaactcgtctggatcctacaacagtaacgccacagcaagtatttgatgcggtgtgtcatatgcgcaccaccaaactccctgatccaaaagtgaatggcaatgccggtagtttcttcaaaaaccctgttgtatctgccgaaacggctaaagcattactgtcacaatttccaacagcaccaaattacccccaggcggatggttcagtaaaactggcagcaggttggcttatcgatcagtgccagctaaaagggatgcaaatgggtggggttgcggtgcaccgtcaacaggcgttagttctcattaatgaagacaatgcaaaaagcgaagatgtggtgcaactggcacaccatgtaagacaaaaagtgggtgaaaaatttaatgtctggcttgagcctgaagtccgctttattggtgcatcaggtgaagtgagcgcagtggagacaatttcatgaaggataacaccgtgccactgaaattaatcgcgctgttagcgaatggcgaatttcactcaggtgagcagttgggtgaaacgttaggaatgagccgggcggctattaataaacacattcagacactgcgtgactggggcgttgatgtctttaccgttccgggtaaaggatacagcctgcctgagcctatccagttacttaatgctgaacagatattgggtcagctggatggcggtagtgtaactgtgctgccagtgattgactccacgaatcagtaccttcttgatcgtatcggagagcttaaatcgggcgatgcctgcgttgcagaataccagcaggctggccgtggtcgccggggtcggaaatggttttcgccttttggcgcaaacttatatttgtcgatgttctggcgtctggaacaaggcccggcggcggcgattggtttaagtctggttatcggtatcgtgatggcggaagtattacgcaagctgggagcagataaagttcgtgtcaaatggcctaatgacctctatctgcaggatcgcaagctggcaggcattcttgtggagctgactggcaaaaccggcgatgcggcgcaaatagtcattggagccgggatcaacatggcaatgcgtcgtgttgaagagagtgtcgttaatcaggggtggatcacgctgcaggaagcggggatcaatctcgatcgtaatacgttggcggccatgctaatacgtgaattacgcgcggcgctggaactcttcgaacaagaaggattggcaccttatctttcgcgctgggaaaagctggataattttattaatcgcccagtgaaacttatcattggtgataaagaaatatttggcatttcacgcggaatagacaaacaaggcgctttattgcttgagcaggatggaataataaaaccctggatgggcggtgaaatatccctgcgtagtgcagaaaaataagaaaggggagcattagctcccctgcaaattatttgcgtagtctgacctcttctaccgcatgattagcacttttcgtcaggattaaactggcgcgctcgcgagtaggtagaatattttgctttaagttcagccagttgatctctttccacaacgtcatggcagtcttaatagcttcttctttagttaatttcgcgtagttatgaaaataggaatccgggtctgtaaaagccccttcgcggaatttcagaaaacggttgatataccatgtctgaagtaagtcttccggtgcatcaacatatatcgaaaaatcgacaaaatcagaaacaaatacatgatgtggatcgtgtggataatccatcccgctctgtaagacatttaacccttcaagaattaaaatatcaggctgaacaacagttttatctccatccgggatcacatcataaataagatgcgagtaaacaggggctgtaacgtttggcacgccggacttgagatcggaaacaaacttcaccaggcgatgcatatcatacgattccgggaagcctttcttcttcatcagaccacgttctttcagaacctgattagggtgaaggaagccatctgtagtgatcagttcaacacgacgatgttccggccaacggcttaatagtgcctgcaatacacgggcggttgtacttttccccaccgcgacactaccagcaatactgataatgtaaggaatgcgttgcccgttggtaccaagaaactgttccagaactgcctgacggcgcagattcgagcttatatagaagttcagcaaacgtgacagaggtaaatagatctcggcaacttcttctaacgagagatcttcattaatacctttgagacgggcgatctcatcttccgataacgtcataggtacggaatcacgcagagctgcccactggttgcggtcaaactgtaggtaaggcgtcattaacgttaakcatgtttctggcggtcatagctctatcggcaaagcgatatttgccatggcgcgtcacagttctgttgaatgggttaatgggcaggagggtaacaccagatggggaggaataataagaaaaaatctctcccaggaagctatcgttgaaaagcaatgtgacagatattccatctgataaaaagaattatggtttagcaggagcgcattgttgagcacaatgatgttgaaaaagtgtgctaatctgccctccattcggctgtttcttcatcgtgtcgcataaaatgtgaccaataaaacaaattatgcaattttttagttgcatgaactcgcatgtctccatagaatgcgcgctacttgatgccgacttagctcagtaggtagagcaactgacttgtaatcagtaggtcaccagttcgattccggtagtcggcaccatcaagtccggtggggttcccgagcggccaaagggagcagactgtaaatctgccgtcacagacttcgaaggttcgaatccttcccccaccaccaatttcggccacgcgatggcgtagcccgagacgataagttcgcttaccggctcgaataaagagagcttctctcgatattcagtgcagaatgaaaatcaggtagccgagttccaggatgcgggcatcgtataatggctattacctcagccttccaagctgatgatgcgggttcgattcccgctgcccgctccaagatgtgctgatatagctcagttggtagagcgcacccttggtaagggtgaggtcggcagttcgaatctgcctatcagcaccacttcttttctcctccctgttttttccttctgtttattgcattcaacaagtcgggcatgttgcctggttgatgtggtgatatcaccgatttatccgtgtcttagaggagggacaatcgatgtctaaagaaaagtttgaacgtacaaaaccgcacgttaacgtcggtactatcggccacgttgaccatggtaaaacaacgctgaccgctgcaatcactaccgtactggctaaaacctacggcggtgctgctcgcgcattcgaccagatcgataacgcgccggaagaaaaagctcgtggtatcaccatcaacacttctcacgttgaatacgacaccccgacccgtcactacgcacacgtagactgcccggggcacgccgactatgttaaaaacatgatcaccggtgctgctcagatggacggcgcgatcctggtagttgctgcgactgacggcccgatgccgcagactcgtgagcacatcctgctgggtcgtcaggtaggcgttccgtacatcatcgtgttcctgaacaaatgcgacatggttgatgacgaagagctgctggaactggttgaaatggaagttcgtgaacttctgtctcagtacgacttcccgggcgacgacactccgatcgttcgtggttctgctctgaaagcgctggaaggcgacgcagagtgggaagcgaaaatcctggaactggctggcttcctggattcctacattccggaaccagagcgtgcgattgacaagccgttcctgctgccgatcgaagacgtattctccatctccggtcgtggtaccgttgttaccggtcgtgtagaacgcggtatcatcaaagttggtgaagaagttgaaatcgttggtatcaaagagactcagaagtctacctgtactggcgttgaaatgttccgcaaactgctggacgaaggccgtgctggtgagaacgtaggtgttctgctgcgtggtatcaaacgtgaagaaatcgaacgtggtcaggtactggctaagccgggcaccatcaagccgcacaccaagttcgaatctgaagtgtacattctgtccaaagatgaaggcggccgtcatactccgttcttcaaaggctaccgtccgcagttctacttccgtactactgacgtgactggtaccatcgaactgccggaaggcgtagagatggtaatgccgggcgacaacatcaaaatggttgttaccctgatccacccgatcgcgatggacgacggtctgcgtttcgcaatccgtgaaggcggccgtaccgttggcgcgggcgttgtagcaaaagttctgagctaattgccgataacatttgacgcaatgcgcactaaaagggcatcatttgatgccctttttgcacgctttcgtaccagaacctggctcatcagtgattttctttgtcataatcattgctgagacaggctctgttgagggcgtataatccgaaaagctaatacgcgtttcgatttggtttgcctcgcgatcgcggggtgaaaatgtttgtagaaaacttctgacaggttggtttatgagtgcgaataccgaagctcaaggaagcgggcgcggcctggaagcgatgaagtgggtcgttgtggtggcattgctcttggtggcgattgtcggcaactatctttatcgcgacattatgctgccgctgcgtgcgctggccgtagtaattctgattgctgcagcgggtggtgtcgcgctgttaacgacaaaaggtaaagctaccgttgcttttgcccgtgaagcgcgtaccgaagtccgtaaggtcatttggccgactcgccaggaaacattgcacaccacgctgattgtggctgcggttaccgcagtaatgtcactgatcctgtggggactggatggtattctggttcgcctggtatcctttatcactggcctgaggttctgagatgtctgaagctcctaaaaagcgctggtacgtcgttcaggcgttttccggttttgaaggccgcgtagcaacgtcgctgcgtgagcatatcaaattacacaacatggaagatttgtttggtgaagtcatggtaccaaccgaagaagtggttgaaatccgtggcggtcagcgtcgcaaaagcgaacgtaaattcttccctggctacgtcctcgttcagatggtgatgaacgacgcgagctggcacctggtgcgcagcgtaccgcgtgtgatgggcttcatcggcggtacttccgatcgtcctgcgccaatcagcgataaagaagtcgatgcgattatgaaccgcctgcagcaggttggtgataagccgcgtccgaaaacgctgtttgaaccgggtgaaatggtccgtgttaatgatggtccgttcgctgacttcaacggtgttgttgaagaagtggattacgagaaatctcgtctgaaagtgtctgtttctatcttcggtcgtgcgaccccggtagagctggacttcagccaggttgaaaaagcctaacccagcgatcaaaaaagcggcgatttaatcgttgcacaaggcgcgagattggaatacaatttcgcgccttttgtttttatgggtcttgcccgtaaaacgattttttatatcacggggagcctctcagaggcgttattacccaacttgaggaatttataatggctaagaaagtacaagcctatgtcaagctgcaggttgcagctggtatggctaacccgagtccgccagtaggtccggctctgggtcagcagggcgtaaacatcatggaattctgcaaagcgttcaacgcaaaaactgattccatcgaaaaaggtctgccgattccggtagtaatcaccgtttacgctgaccgttctttcactttcgttaccaagactccgccggcagcagttctgctgaaaaaagcggctggtatcaagtctggttccggtaagccgaacaaagacaaagtgggtaaaatttcccgcgctcagctgcaggaaatcgcgcagaccaaagctgccgacatgactggtgccgacattgaagcgatgactcgctccatcgaaggtactgcacgttccatgggcctggtagtggaggactaagaaatggctaaactgaccaagcgcatgcgtgttatccgcgagaaagttgatgcaaccaaacagtacgacatcaacgaagctatcgctctgctgaaagagctggcgactgctaaattcgtagaaagcgtggacgtagctgttaacctcggcatcgacgctcgtaaatctgaccagaacgtacgtggtgcaactgtactgccgcacggtactggccgttccgttcgcgtagccgtatttacccagggtgcaaacgctgaagctgctaaagctgcaggtgctgaactggtaggtatggaagatctggctgaccagatcaagaaaggcgaaatgaactttgacgttgttattgcttctccggatgcaatgcgcgttgttggccagctgggccaggttctgggtccgcgcggcctgatgccaaacccgaaagtgggtactgtaacgccgaacgttgctgaagcggttaaaaacgctaaagctggccaggttcgttaccgtaacgacaaaaacggcatcatccacaccaccatcggtaaagtggactttgacgctgacaaactgaaagaaaacctggaagctctgctggttgcgctgaaaaaagcaaaaccgactcaggcgaaaggcgtgtacatcaagaaagttagcatctccaccaccatgggtgcaggtgttgcagttgaccaggctggcctgagcgcttctgtaaactaatgcctttacgtgggcggtgattttgtctacaatcttacccccacgtatgctaacgaaagttagcagctaaaaagatttgttcgttggagcctggcctatccaggcctccgtcgaagaccgcaggagtttcgcaagaaacttaatcccctgcgtagacggtgacagaacgctaagattattcttttatattctggcttgtttctgctcaccgtaattaagacgctctctccgtttggaggagtgaagtgagttccagagattttctctggcaaacatccaggagcaaagctaatggctttaaatcttcaagacaaacaagcgattgttgctgaagtcagcgaagtagccaaaggcgcgctgtctgcagtagttgcggattcccgtggcgtaactgtagataaaatgactgaactgcgtaaagcaggtcgcgaagctggcgtatacatgcgtgttgttcgtaacaccctgctgcgccgtgctgttgaaggtactccgttcgagtgcctgaaagacgcgtttgttggtccgaccctgattgcatactctatggaacacccgggcgctgctgctcgtctgttcaaagagttcgcgaaagcgaatgcaaaatttgaggtcaaagccgctgcctttgaaggtgagctgatcccggcgtctcagatcgaccgcctggcaactctgccgacctacgaagaagcaattgcacgcctgatggcaaccatgaaagaagcttcggctggcaaactggttcgtactctggctgctgtacgcgatgcgaaagaagctgcttaatcgcagttatctttttaacgcattcgcttacgtataaacttattctgatattcaggaacaatttaaatgtctatcactaaagatcaaatcattgaagcagttgcagctatgtctgtaatggacgttgtagaactgatctctgcaatggaagaaaaattcggtgtttccgctgctgctgctgtagctgtagctgctggcccggttgaagctgctgaagaaaaaactgaattcgacgtaattctgaaagctgctggcgctaacaaagttgctgttatcaaagcagtacgtggcgcaactggcctgggtctgaaagaagctaaagacctggtagaatctgcaccggctgctctgaaagaaggcgtgagcaaagacgacgcagaagcactgaaaaaagctctggaagaagctggcgctgaagttgaagttaaataagccaacccttccggttgcagcctgagaaatcaggctgatggctggtgactttttagtcaccagcctttttgcgctgtaaggcaccagtagcgtttcacactgtttgactactgctgtgcctttcaatgcttgtttctatcgacgacttaatatactgcgacaggacgtccgttctgtgtaaatcgcaatgaaatggtttaagcgtgatagcaacaggcattgcggaaagtgttccattttccggtcaacaaaatagtgttgcacaaactgtccgctcaatggacagatgggtcgacttgtcagcgagctgaggaaccctatggtttactcctataccgagaaaaaacgtattcgtaaggattttggtaaacgtccacaagttctggatgtaccttatctcctttctatccagcttgactcgtttcagaaatttatcgagcaagatcctgaagggcagtatggtctggaagctgctttccgttccgtattcccgattcagagctacagcggtaattccgagctgcaatacgtcagctaccgccttggcgaaccggtgtttgacgtccaggaatgtcaaatccgtggcgtgacctattccgcaccgctgcgcgttaaactgcgtctggtgatctatgagcgcgaagcgccggaaggcaccgtaaaagacattaaagaacaagaagtctacatgggcgaaattccgctcatgacagacaacggtacctttgttatcaacggtactgagcgtgttatcgtttcccagctgcaccgtagtccgggcgtcttctttgactccgacaaaggtaaaacccactcttcgggtaaagtgctgtataacgcgcgcatcatcccttaccgtggttcctggctggacttcgaattcgatccgaaggacaacctgttcgtacgtatcgaccgtcgccgtaaactgcctgcgaccatcattctgcgtgccctgaactacaccacagagcagatcctcgacctgttctttgaaaaagttatctttgaaatccgtgataacaagctgcagatggaactggtgccggaacgcctgcgtggtgaaaccgcatcctttgacatcgaagctaacggtaaagtgtacgtagaaaaaggccgccgtatcactgcgcgccacattcgccagctggaaaaagacgacgtcaaactgatcgaagtcccggttgagtacatcgcaggtaaagtggttgctaaagactatattgatgagtctaccggcgagctgatctgcgcagcgaacatggagctgagcctggatctgctggctaagctgagccagtctggtcacaagcgtatcgaaacgctgttcaccaatgatctggatcacggcccgtatatctctgaaaccttacgtgtcgacccaactaacgaccgtctgagcgcactggtagaaatctaccgcatgatgcgccctggcganccgccgactcgtgaagcagcggaaagcctgttcgagaacctgttcttctccgaagaccgttatgacctgtctgcggttggtcgtatgaagttcaaccgttctctgctgcgcgaagaaatcgaaggttctggtatcctgagcaaagacgacatcattgatgttatgaaaaagctcatcgatatccgtaacggtaaaggcgaagtcgatgatatcgaccacctcggcaaccgtcgtatccgttccgttggcgaaatggcggaaaaccagttccgcgttggcctggtacgtgtagagcgtgcggtgaaagagcgtctgtctctgggcgatctggataccctgatgcctcaggatatgatcaacgccaagccgatttccgcagcagtgaaagagttcttcggttccagccagctgtctcagtttatggaccagaacaacccgctgtctgagattacgcacaaacgtcgtatctccgcactcggcccaggcggtctgacccgtgaacgtgcaggcttcgaagttcgagacgtacacccgactcactacggtcgcgtatgtccaatcgaaacccctgaaggtccgaacatcggtctgatcaactctctgtccgtgtacgcacagactaacgaatacggcttccttgagactccgtatcgtaaagtgactgacggtgttgtaactgacgaaattcactacctgtctgctatcgaagaaggcaactacgttatcgcccaggcgaactccaacctggatgaagaaggccacttcgtagaagacctggtaacctgccgtagcaaaggcgaatccagcttgttcagccgtgaccaggttgactacatggacgtatccacccagcaggtggtatccgtcggtgcgtccctgatcccgttcctggaacacgatgacgccaaccgtgcattgatgggtgcgaacatgcaacgtcaggccgttccgactctgcgtgctgataagccgctggttggtactggtatggaacgtgctgttgccgttgactccggtgtaactgcggttgctaaacgtggtggtgtcgttcagtacgtggatgcttcccgtatcgttatcaaagttaacgaagacgagatgtatccgggtgaagcaggtatcgacatctacaacctgaccaaatacacccgttctaaccagaacacctgtattaaccagatgccgtgtgtgtctctgggtgaaccggttgaacgtggcgacgtgctggcagacggtccgtccaccgacctcggtgaactggcgcttggtcagaacatgcgcgtagcgttcatgccgtggaatggttacaacttcgaagactccatcctcgtatccgagcgtgttgttcaggaagaccgtttcaccaccatccacattcaggaactggcgtgtgtgtcccgtgacaccaagctggggccagaagagatcaccgctgacatcccgaacgtgggtgaagctgcgctctccaaactggatgaatccggtatcgtttatattggtgcggaagtgaccggtggcgacattctggttggtaaggttacgccgaaaggtgaaactcagctgaccccagaagaaaaactgctgcgtgcgatcttcggtgagaaagcgtctgacgttaaagactcttctctgcgcgtaccaaacggtgtatccggtacggttatcgacgttcaggtctttactcgcgatggcgtagaaaaagacaaacgtgcgctggaaatcgaagaaatgcagntcaaacaggcgaagaaagacctgtctgaagaactgcagatcctcgaagcgggtctgttcagccgtatccgtgctgtgctggtagccggtggcgttgaagctgagaagctcgacaaattgccgcgcgatcgctggctggagctgggcctgaccgacgaagagaaacaaaatcagctggaacagctggctgagcagtatgacgaactgaaacacgagttcgagaagaaactcgaagcgaaacgccgcaaaatcacccagggcgacgatctggcaccgggcgtgctgaagattgttaaggtatatctggcggttaaacgccgtatccagcctggtgacaagatggcaggtcgtcacggtaacaagggtgtaatttctaagatcaacccgatcgaagatatgccttacgatgaaaacggtacgccggtagacatcgtactgaacccgctgggcgtaccgtctcgtatgaacatcggtcagatcctcgaaacccacttgggtatggctgcgaaaggtatcggcgacaagatcaacgccatgctgaaacagcagcaggaagtcgcgaaactgcgtgaattcatccagcgtgcgtacgatctgggcgctgacgttcgtcagaaagttgacctgagtaccttcagcgatgaagaagttatgcgtctggctgaaaacctgcgcaaaggtatgccaatcgcaacgccggtgttcgacggtgcgaaagaagcagaaattaaagagctgctgaaacttggcgacctgccgacttctggtcagatccgcctgtacgacggccgcactggtgaacagttcgaacgtccggtaaccgttggttacatgtacatgctgaaactgaaccacctggtcgacgacaagatgcacgcgcgttccaccggttcttacagcctggttactcagcagccgctgggtggtaaggcacagttcggtggtcagcgtttcggggagatggaagtgtgggcgctggaagcatacggcgcagcatacaccctgcaggaaatgctcaccgttaagtctgatgacgtgaacggtcgtactaagatgtataaaaacatcgtggacggcaaccatcagatggagccgggcatgccagaatccttcaacgtattgttgaaagagattcgttcgctgggtatcaacatcgaactggaagacgagtaattctcgctcaaacaggtcactgctgtcggggtaaaacccggcagcggattgtgctaactccgacgggagcaaatccgtgaaagatttattaaagtttctgaaagcgcagactaaaaccgaagagtttgatgcgatcaaaattgctctggcttcgccanacatgatccgttcatggtctttcggtgaagttaaaaagccggaaaccatcaactaccgtacgttcaaaccagaacgtgacggccttttctgcgcccgtatctttgggccggtaaaagattacgagtgcctgtgcggtaagtacaagcgcctgaaacaccgtggcgtcatctgtgagaagtgtggcgttgaagtgacccagactaaagtacgccgtgagcgtatgggccacatcgaactggcttccccgactgcgcacatctggttcctgaaatcgctgccgtcccgtatcggcctgctgctcgatatgccgctgcgcgatatcgaacgcgtactgtactttgaatcctatgtggttatcgaaggcggtatgaccaacctggagcgtcagcagatcctgactgaagagcagtatctggacgcgctggaagagttcggtgacgaattcgacgcgaaaatgggtgcggaagcaatccaggccctgctgaagagcatggatctggagcaagagtgcgaacagctgcgtgaagagctgaacgaaaccaactccgaaaccaagcgtaaaaagctgaccaagcgtatcaaactgctggaagcgttcgttcagtctggtaacaaaccagagtggatgatcctgaccgttctgccggtactgccgccagatctgcgtccgctggttccgctggatggtggtcgtttcgcgacttctgacctgaacgatctgtatcgtcgcgtcattaaccgtaacaaccgtctgaaacgtctgctggatctggctgcgccggacatcatcgtacgtaacgaaaaacgtatgctgcaggaagcggtagacgccctgctggataacggtcgtcgcggtcgtgcgatcaccggttctaacaagcgtcctctgaaatctttggccgacatgatcaaaggtaaacagggtcgtttccgtcagaacctgctcggtaagcgtgttgactactccggtcgttctgtaatcaccgtgggtccatacctgcgtctgcatcagtgcggtctgccgaagaaaatggcgctggagctgttcaaaccgttcatctacggcaagctggaactgcgtggtcttgctaccaccattaaagctgcgaagaaaatggttgagcgcgaagaagctgtcgtttgggatatcctggacgaagttatccgcgaacacccggtactgctgaaccgtgcaccgactctgcaccgtctgggtatccaggcatttgaaccggtactgatcgaaggtaaagctatccagctgcacccgctggtttgtgcggcatataacgccgacttcgatggtgaccagatggctgttcacgtaccgctgacgctggaagcccagctggaagcgcgtgcgctgatgatgtctaccaacaacatcctgtccccggcgaacggcgaaccaatcatcgttccgtctcaggacgttgtactgggtctgtactacatgacccgtgactgtgttaacgccaaaggcgaaggcatggtgctgactggcccgaaagaagcagaacgtctgtatcgctctggtctggcttctctgcatgcgcgcgttaaagtgcgtatcaccgagtatgaaaaagatgctaacggtgaattagtagcgaaaaccagcntgaaagacacgactgttggccgtgccattctgtggatgattgtaccgaaaggtctgccttactccatcgtcaaccaggcgctgggtaaaaaagcaatctccaaaatgctgaacacctgctaccgcattctcggtctgaaaccgaccgttatttttgcggaccagatcatgtacaccggctttgcatatgcagcgcgttctggtgcatctgttggtatcgatgacatggtcatcccggagaagaaacacgaaatcatctccgaggcagaagcagaagttgctgaaattcaggagcagttccagtctggtctggtaactgcgggcgaacgctacaacaaagttatcgatatctgggctgcggcgaacgatcgtgtatccaaagcgatgatggataacctgcaaactgaaaccgttattaaccgtgacggtcaggaagagaagcaggtttccttcaacagcatctacatgatggccgactccggtgcgcgtggttctgcggcacagattcgtcagcttgctggtatgcgtggtctgatggcgaagccggatggctccatcatcgaaacgccaatcaccgcgaacttccgtgaaggtctgaacgtactccagtacttcatctccacccacggtgctcgtaaaggtctggcggataccgcactgaaaactgcgaactccggttacctgactcgtcgtctggttgacgtggcgcaggacctggtggttaccgaagacgattgtggtacccatgaaggtatcatgatgactccggttatcgagggtggtgacgttaaagagccgctgcgcgatcgcgtattgggtcgtgtaactgctgaagacgttctgaagccgggtactgctgatatcctcgttccgcgcaacacgctgctgcacgaacagtggtgtgacctgctggaagagaactctgtcgacgcggttaaagtacgttctgttgtatcttgtgacaccgactttggtgtatgtgcgcactgctacggtcgtgacctggcgcgtggccacatcatcaacaagggtgaagcaatcggtgttatcgcggcacagtccatcggtgaaccgggtacacagctgaccatgcgtacgttccacatcggtggtgcggcatctcgtgcggctgctgaatccagcatccaggtgaaaaacaaaggtagcatcaagctcagcaacgtgaagtcggttgtgaactccagcggtaaactggttatcacttcccgtaacaccgaactgaaactgatcgacgaattcggtcgtaccaaagaaagctacaaagtaccttacggtgcggtactggcaaaaggcgatggcgaacaggttgctggcggcgaaaccgttgcaaactgggacccgcacaccatgccggttatcaccgaagtaagcggttttgtacgctttactgacatgatcgacggccagaccattactcgtcagaccgacgaactgaccggtctgtcttcgctggtggttctggattccgcagaacgtaccgcaggtggtaaagatctgcgtccggcactgaaaatcgttgatgctcagggtaacgacgttctgatcccaggtaccgatatgcctgcgcagtacttcctgccgggtaaagcgattgttcagctggaagatggcgtacagatcagctctggtgacaccctggcgcgtattccgcaggaatccggcggtaccaaggacatcaccggtggtctgccacgcgttgcggacctgttcgaagcacgtcgtccgaaagagccggcaatcctggctgaaatcagcggtatcgtttccttcggtaaagaaaccaaaggtaaacgtcgtctggttatcaccccggtagacggtagcgatccgtacgaagagatgattccgaaatggcgtcagctcaacgtgttcgaaggtgaacgtgtagaacgtggtgacgtaatttccgacggtccggaagcgccgcacgacattctgcgtctgcgtggtgttcatgctgtgactcgttacatcgttaacgaagtacaggacgtataccgtctgcagggcgttaagattaacgataaacacatcgaagttatcgttcgtcagatgctgcgtaaagctaccatcgttaacgcgggcagctccgacttcctggaaggcgaacaggttgaatactctcgcgtcaagatcgcaaaccgcgaactggaagcgaacggcaaagtgggtgcaacttactcccgcgatctgctgggtatcaccaaagcgtctctggcaaccgagtccttcatctccgcggcatcgttccaggagaccactcgcgtgctgaccgaagcagccgttgcgggcaaacgcgacgaactgcgcggcctgaaagagaacgttatcgtgggtcgtctgatcccggcaggtaccggttacgcgtaccaccaggatcgtatgcgtcgccgtgctgcgggtgaagctccggctgcaccgcaggtgactgcagaagacgcatctgccagcctggcagaactgctgaacgcaggtctgggcggttctgataacgagtaatcgttaatccgcaaataacgtaaaaacccgcttcggcgggtttttttatggggggagtttagggaaagagcatttgtcagaatatttaaggaatttctgaatactcataatcaatgtagagatgactaatatcctgaaactgactgaactaattgagtcaaactcggcaaggattcgatactattcctgtgtagctttcttaaggaacgagaatgaaacaggaagtggagaagtggcgaccttttaaacatccggatggcgacgttcgtgatttatcgtttcttgatgctcatcaggttatctacgttcagcatcatgaggacaaggagcctttagagtatcgcttttgggttacctactctcttcactgcttcacaaaagattatgaacatcagacgaacgaagaaaaactatcgttaatgtaccacgcgcctaaagaatctcgtcccttctgccagcaccgttataacttagcgcgcacacacttaaaaagaactattttggcgctgccagaaagcaacgttattcatgccgggtatggtagctatgccgtgattgaggtggacttagacggaggagataaggcattttactttgttgcgttcagggctttcagtgaaatttttcaccattgcctaaaacttattgagaaataagcagcttcctcagccctcaaaataacaaaacccaccttaaggtgggtttcgccagagaattatctctggtattcagaacgccattaccggactttgccttgaccttgcgataatcgcaggttgcgggatgtctgaatttcttcagtctgctgcatcctggaagatgagaacatgtgttcttattttcgtctctatcatagttgagtatttactctcttacaatcagatctctttcattgctcaacaggcgatggcttcagactttgcattacggaatttttaagaaaggcagggcgaaacgaggaagaagcttttcgccctggacaacattcctgctgacggcactaccataaaaaaacacaacgctttcaacaaccttgcgtttttcatcttccgtagcggctcggaataaattttcgttctnacattccgtctcatagtctttgcgaggcgcgtcccagatagctgtcccagtctttccataccggctgcaaaccctgagcggttaacgcggcagcaaccgcttccggtctgcgctcgtcgtgcggtgagaactgttccagctcggggtgattgtcggcatagccacctggctgcgttttcgaaaaagcgctgacgttattaattgccagcggaataacgcgatcgcgaaaccacggtgattcccgcgtggagagtgacagttcaatctccggtgcaagcagccggaaggcgcagatggtttgcactaactggcgttcatccataatcgacgcaggctcaatgccgccagtacatggacgcaggcgtgggaaggagacagagtagcggctttgccagtaatgctgttgcagccatagcaaatgttctgcaaccatatagcagtcaacgcgccagctgtcggaaaggccaattagcgcgccgaggcctatcttatcaatccccgcacggcccagccgatccggcgtttccagccgccagaagaagtcctgttttttgcctttcagatgatggcgggcataagtcgcctcgtgatatgtctcctgataaaccatcacgccatccagaccaagttgctttaactcggcgtattccgtctccgccagcggctgtacttccatctgtagtgaagagaactgttcacgcagggcagggagatgacgacgaaagtaatccatccccactttcgcctgatgttcaccggtgactaaaagcagatgttcaaagcccatctcccgtatagcggcgctttccctggcaatatccgcttcatccagcgttttgcgcttgatgcggttgctcatagagaatccgcagtacgtgcagtcgttagcgcaaagattggaaagataaagcgggacgtagaaactaactgtgttgccaaatcgctgacgggtcagacgctgcgcccgttgggccagttgttccagatagccactggcggctggcgataacagcgccatcatatcgtcgcgggtgagttgcgaggcatttagcgcccgctctacgtcagcagccgttttgccgttgatacgcaggcggatgtcgtcccagtccagttgtcgccagcgatcgctgaaggttttcataccgatgcctccagaaatccggtcagcgggctggtggcatgagcaaaataactgcggctgcccggtccngactgaggtgccagcaggcctgcttctactgccagacgaaatgccttcgccatgttgacgggatcgtccgcgacggcaatcgccgtattcactaacaccgcgtcggcccccatttccagcgcctgcgcggcatggctgggaacgccgatgccagcatcgacaaccaccggaactgtggcctgctggataataatctccagcatggcgcgggtttccagcccctgattcgagccaatcg

SEQ ID NO: 1646 - DNA, 4356 bp, Escherichia coli
  Strain O55:H7
  modified_base (482)..(482): a, c, g or t
  modified_base (1981)..(1981): a, c, g or t
  modified_base (1984)..(1984): a, c, g or t
  modified_base (2012)..(2012): a, c, g or t
  modified_base (2057)..(2057): a, c, g or t
  modified_base (2074)..(2074): a, c, g or t
  modified_base (2085)..(2085): a, c, g or t
  modified_base (2109)..(2109): a, c, g or t
  modified_base (2176)..(2176): a, c, g or t
  modified_base (2193)..(2193): a, c, g or t
  modified_base (2989)..(2989): a, c, g or t
  modified_base (3514)..(3517): a, c, g or t
gcggcatcaccgctgcacagccgacttcttccagacgtttacacaataccggatcggccccgcagtaaggcagcacgacaaatccctgttgtaccagcgtttcggcggctttcagggtttcgatgggatcgggcaacagccagcgggcgtcagggtgaatctccaattttaaccagtttgtgcctaacgcttcacgagccagatgggcggcgaaaatggcttcttccgctgttttcgccccggatgtatttggcagcagggtcacacccgccgcgataagcggttcgaggatagcgtcgttgtgctggcgcaagtcgacacgtttcatcgccagcgtcaccagctggctgccggaagcgcggattgcctctaccatcagttgtgaagaggcgaatttcccggtgccggtaaacagatgtgaatcaaacgttttgtccgcaatacgtaacatctcaaccccctgcaataacctgaaaaagtangatctggtcgccatcctgcacgatatgttgcgtccactgctcacgcgggacgatttgctgattaatcgccagagccgcgcccgcttgtcgttggacgagttgctccagtagttcgtgaacagtttgcccggcggcgcactgcatcggttgatcgttaaacaggatctgcattgcttcctccgcataccgggcaaccactggcgcggcgcaacgccaggctgcgccactggctcgacttaccgtcgaacagtcggagttctcccgcaggcgtctctataccgcttaataacttaatggcttccagtgcctgcaaagtgcccataaccccgaccaccgggccaaccacgcccgccgtgcggcagttgcgttctggctcctggttttctggccacaggcagcggtaacaaccctgcccccagggcggcgtcagtaccatcaactgaccgccaaatccgaccgcgctggcggtgataagcggcgtgttgagtgccacgcaggcggcattaatctcctggcgagtcgccatattgtcggtacagtcgagcaccacatcggcttgtgcaaccgcatcttttaacgcctcacccgttaaccgttgttgtaatgctgtcagttgaatatcgggattcaactgtgtcagtcgctgatggctgacctgcgatttcgggcgatcgatatcttcagtggtaaagaggatttgtcgttgcagattgcttaaatgcacatcgtcgtcatctgccagtaccagcgtcccgacgccagcgcccgccaggtatagcgcagcaggtgtacccagcccgccaagaccgataatcagcacctggctgtcgagcagtttttgctgcccgtcaagagcgatatcgtcgagcaggatttggcggctataacgcataaaatcacggtcattcatcgccaactcctgcaatttccagcaactgtgccgttgccaaacgccagtctgcggcttgagtaatggcgctgacgacggcgatactgccgacacccgttgctatcaccgcaggcgcgcgtgccagactgataccgccaatcgccacggtgggataatccgacagtcgctcaacatgccgtgccagctgttccagcccctgcggtgcagaaggcatctgtttggtttgcgtcgggaacacatgtcccagcgcgatataagaggggcgtgctgccagcgcgacgtcgatttccatatcgtcatgggtcgaaacgcccagccgcaggcctgccgcgcggatggcattgagatcggtggcttgcaaatcttcctgccccaaatggacgccatacgcctgatgcttgatcgcgagccgccagtaatcgttgataaacaatcgcgcgttatagcggcggcccagcgcaattgccgccacgacatcggcttccacctcttcatcgcgccgatctttgatgcgtagctggagagtacgtacgcctgcatccaacagacgttcgatccactgtacgctgtccaccaccgggtacagtcntanacgaaaaggtacaggaggaaaatcaggntgatacatcacgcttcctccttacgcaggtagatttctccgcctntggcacggaagttctcngacatatccgntattcccatttcaatagtttgcgnggcggcgtaatcacgcacttcctggctgattttcatcgagcagaatttcggcccacacatggagcanaaatgggcgactttacntgactcttgcggcagggtttcatcgtgataagcgcgggcggtaaacgggtcgagggccagattaaactggtcttcccagcgaaattcgaagcgggctttcgacatggcgttatcgcgaatttgtgcgcccggatgccctttcgccaggtcagcggcgtgggcggcaatcttataggtggtaagcccctgcttaacatcttctttattaggcagacccagatgctcttttggcgttacgtaacagagcatcgcgcagccaaaccagccaatcatcgccgcaccaatccccgacgtgaagtggtcatagcccggcgcaatatcggtagttagcggccccagagtgtaaaacggcgcttcgtggcagtgctctaactcctcggtcatattgcggcggatcatctgcatcggcacgtggcctgggccttcaatcatcacctgcacatcatattcccaggcgatttttgtcagttcgcccagcgtatgcagctcggcaaactgcgcttcatcgttggcgtcctgaatagaaccggggcgcagaccgtcgcccagcgacagcgaaacgtcataagcggcacagatttcacaaatttcgcggaagtgttgatagaggaaattttcctgatgatgggagaggcaccatttcgccataatcgaaccgccgcgcgagacgataccggtcaggcgtttcgcggtcatcggcacatagcgcagcagcacccccgcatggatagtgaagtaatccacaccttgctcggcctgttccagcagcgtgtcgcggaacgcttcccaggtaagntcttcggcgatcccattaaccttctccagcgcctggtagatcggcactgtaccaatcggcaccgggctgttacgcaaaatccactcgcgggtttcgtgaatatagcgaccggtggagagatccatcaccgtatccgctccccagcgcgtggaccataccagcttttccacttcttcttcgatggaagaggtgaccgccgagttgccgatattggcgttaacttttaccaggaaattgcgaccaataatcatcggctccgattccggatgattaatgttggccgggataatcgcacgtccggcagcaacttcatcacggacaaattccgcagtgatattttccggcagacgtgcgccaaagctcattcccggatgctggtggcgtaaaacttcgctacggatgcgctcgcggcccatattctcgcggatggcgatgaattccatttccggtgtgatgatgccctggcgggcgtagtgcagttgtgtgacgcggcgtcctgctttggcgcgttttggcgttaatacnnnnctaaaacgcagctcgtcgaggccatcatctgccagccgcgctttagtgtaatcggaactgcgcacggtaagttcttcggtatcgccgcgcgcatcgatccacggctggcgtagttttgccagcccttgctgcacgttaatggcgatctgcggatcgccatacgggccggaggtgtcgtagaccggaatcgcttcgttttcttcgtactgcggctgttctttgctaccgccaattagcgtcgggctaagctggatctcacgcatcggcacgcgcacgccgggttgtgtgccagtgatataaatgcgttttgagttgggaaaggcggtgccttccagggtgtcgataaaatgttgggcctgggcgcgttgttcgcgacgggtcagttttgttgcagacatagctcattccaaaaagttaaggacgtggcttgtcagacgacggatgaagcaagagacgatcgccgcaaaggcgatgcgatagcagattaactcttgttcccttcgcaggtattagcctgatcaggttccgcggatcccgaataaacggtctcagccagttaaggcactccgacaagaaattagccccacaaacggggcgttgaatgtaaattacgcgttaacagcgcagaactcaagcaggatgtttgacgcgggcggcgtcaagcaccagcagaatcagcttatcttccagcacaaagcgcgcttccagcgcctcgccgatgtcagataaaacctgttgaaactcaaggtaattatcatgatcgatagcggtttccaggctggaatcgtagtaatccataatctgttgggtattggcttcgagttgcggccaaatcttcg

SEQ ID NO: 1647 - DNA, 6171 bp, Escherichia coli
  Strain O55:H7
  modified_base (200)..(200): a, c, g or t
  modified_base (481)..(481): a, c, g or t
  modified_base (2195)..(2195): a, c, g or t
  modified_base (2951)..(2951): a, c, g or t
  modified_base (3905)..(3905): a, c, g or t
  modified_base (4289)..(4289): a, c, g or t
  modified_base (4333)..(4336): a, c, g or t
  modified_base (6170)..(6170): a, c, g or t
cgcgagttgcccgttgccttccagcttatgaagaatgcgctcataaatactgaaatgtccggcagacaagtaatcgaccaggctctgacaaaaatcatcaagggctttttcgtttagcctcatgtacgattctttgccaggcttaatgccaaccagattgtagtaagccacgagcagatgcttacgtacatgtagccagngatcaaccagtttgttacttcctctgacgcgctccgtcaggttatcgagctggttaagcatgattgactccgcaagtttgtattcaaaaactgctcagtgagaaatgtaaaaaccatgttaaacatgccagtgatgcaaaggtagtgcaagagctatggatcgtataattgaaaaattagatcacggctggtgggtcgtcagccatgaacaaaaattatggttgccgaagggagaattgccatatggcgaagcggcaaatttcgatcttgtgggtcagcgngcactacaaatcggcgaatggcagggggaacctgtttggttaatacaacagcagcggcgttacgatatggggtcggtacgtcaggtcattgatctcgatgttgggctgtttcaactggccggacgtggcgtacaactggcggagttttaccgatcgcataaatactgtggttactgcgggcatgaaatgtatccaagcaaaaccgaatgggcgatgctgtgcagccattgccgtgagcgttactacccgcaaatcgccccctgcattattgttgccatccgtcgcgatgattcgatcctcctcgcccagcatacccgccatcgtaacggtgtccatacggtacttgccggattcgtcgaagtgggcgaaaccctcgagcaggcggtcgcgcgggaagtgatggaagagagcggaattaaagttaaacacttgcgttatgtgacttcccagccgtggccgtttcctcagtctttaatgaccgcgtttatggcggaatatgacagcggcgacatcgtgatcgacccgaaagaattgctcgaggcgaactggtatcgctatgacgatttgccgttactcccgccgcccggcaccgtagcgcgccgtctgatagaagatacggtggcgatgtgtcgggcagagtatgagtgatgatacactgaccgcctgacgcactaaggaacagccaaaatgaccgaacttaaaaacgatcgttatctgcgggcgctgctgcgccagcccgttgatgtcactccagtatggatgatgcgccaggcgggtcgctatctaccggaatataaagccacgcgcgcccaggcgggcgattttatgtcgctgtgcaaaaacgccgagctggcgtgtgaagtgaccttgcaaccgctgcgtcgctacccgctggatgcggcgatcctcttttccgatatcctcaccgtcccggacgcgatggggttagggctctattttgaagccggagaaggtccgcgttttacctcgccagtcacctgcaaagctgacgtcgataaactgccaattccggacccggaagatgaactggggtacgtgatgaacgcggtgcgtaccattcgtcgcgaactgaaaggcgaagtgccgctgattggtttttccggcagcccgtggacgctggcgacctacatggtggaaggcggcagcagcaaagccttcaccgtgatcaaaaaaatgatgtatgccgatccgcaggcgctgcacgctctactcgataaactggcgaaaagcgtcactttgtatctgaatgcgcagattaaagccggtgctcaggctgtgatgattttcgacacctggggcggcgtgcttaccgggcgcgattatcaacagttctcgctttattacatgcataaaattgttgatggtttactgcgtgaaaacgacggtcgccgcgtaccggtcacgctgtttaccaaaggcggcggacagtggctggaagccatggcagaaaccggttgcgatgcgctgggcctcgactggacaacggacatcgccgatgcgcgccgccgtgtgggcaataaagtcgcgttgcagggtaatatggatccgtcgatgctgtacgcgccgcctgcccgcattgaagaagaagtagcgactatacttgcaggtttcggtcacggcgaaggtcatgtctttaaccttggtcacggcattcatcaggatgtgccgccagaacatgctggcgtgttcgtgnaggcagtgcatcgactgtctgaacagtatcaccgctaaggagcgattatggatctcgcgtcattacgcgctcaacaaatcgaactggcttcttctgtgatccgcgaggatcgactcgataaggatccgccggatctgatcgccggagccgatgtcgggtttgagcagggcggagaagtgacgcgagcggcgatggtgctgctgaaatacccctcgcttgagctggtggagtataaagtggcccgcatcgctaccaccatgccttacattccaggttttctttccttccgcgaatatcctgcgctgctggcagcgtgggagatgctgtcacaaaagccggatttagtgtttgtcgatggtcatgggatctcgcatcctcgccgtcttggcgtcgccagccattttggtttgctggtggatgtgccgaccattggcgtagcgaaaaaacgactatgcggtaaattcgaaccgctctccagcgaaccgggcgcgctggccccactgatggataaaggcgagcagctggcctgggtctggcgcagcaaagcgcgctgtaacccgctatttatcgctactggtcatcgggtcagcgtggacagcgcgctggcgtgggtacaacgctgcatgaaaggctatcgtctgccggagccaacgcgctgggcggacgcggtggcctcggaacgtccggcgttcgtgcgctatacagcaaatcagccctaattcaggtaaactgcggataatttccgtatttgagaantcaacatgttacaaaacccaattcatctgcgtctggaacgcctggaaagctggcagcatgtcactttcatggcttgcttatgcgaacgcatgtaccccaattacgccatgttctgccagcaaaccggttttggtgatgggcaaatttaccgtcgtattctcgatctcatctgggaaacgctgaccgttaaagatgcaaaagtaaatttcgacagccaactggagaaatttgaagaagcgattccttcagccgacgatttcgatctgtacggcgtttatccggcaatcgatgcctgcgtggcgttaagtgaactggtccattcgcgtttgagtggtgaaacgctcgaacacgcggtggaagtgagtaagacctccatcacgaccgttgcgatgctggaaatgactcaggctggtcgcgaaatgagcgatgaagagctcaaagaaaacccagctgtagagcaagaatgggacattcagtgggaaatattccgacttttagctgagtgcgaagaacgcgatatcgagctgataaaaggccttagggcagacctgcgtgaggcgggtgagagcaatattggtataatttttcagcaataagaccagaaaacgtgatttaacgcctgatttgtcgtacctggagtcttccctttcgccccccgtctggtctacatttggggggcgaaaaaaagtggctatcggtgcgtgtatgcaggagagtgctattctggcatttccgtcgcactcgatgcttagcaagcgataaacacattgtaaggataacttatgaacaagactcaactgattgatgtaattgcagagaaagcagaactgtccaaaacccaggctaaagctgctctggagtccactctggctgcaattactgagtctctgaaagaaggcgatgctgtacaactggttggtttcggtaccttcaaagtgaaccaccgcgctgagngtactggccgcaacccgcagaccggtaaagaaatcaaaattgccgcagctaacgtaccggcatttgtttctggcaaggcactgaaagacgcagttaagtaagattgcgtggcagtgaacagttttaacgaaggggtggtttcaccccttttgtctttctggcgtcgatcattgatgctggctggcgctctgtttctcactgcttgtagtcacaactcttcacttcctccctttaccgccagtggatttgctgaagaccagggcgcggtacgcatctggcgaaaagacagcggcgataatgtgcatcttcttgccgtgtttagcccgtggcgcagtggcgataccacgacgcgagagtatcgctggcagggcgataacctcacgntcatcaatatcaatgtttacagcaaacccccggtgaatattcgnnnncgttttgacgatcgcggtgatctgagctttatgcaacgtgaatccgatggggaaaagcagcagctttctaacgaccaaatcgatttataccgttatcgggctgatcagatccgccagattagcgatgccttacgtcaggggagagtcgtgctgcgccaggggcgctggcatgcgatggaacagaccgtgaccacctgcgaagggcaaaccattaaacctgatttagattcgcaggcgatagcgcatatcgagcgccgccagagccgctcttctgttgatgtcagcgtggcatggctggaagcgcccgaaggttcgcaattactgttagtggcaaactctgatttctgtcgctggcaacccaacgagaaaacgttctgatttaccagtggcccatacccatatgaccgccaccaccgcagccgccgtagcccatgcccattccggctccgcgcggaatacccgcttcagccatcgcaatatcccgtttcacccgtaactcatctaacgactgacgcaaattctccatctctttggcgaccgcgttaattttgctgctatccggtgggttcgcggctaacagggcattgtattcataacgcttcgtcaccagttgctgttgcagtgcgctgctttgagcgtaaaagtcattatggattttctgccacgctgtctgttgttcgctggtcaaaggcgcggcattttgctgccacataccgtgtccgccgtgagcaaatgcagatgtcgatcccatcgccattgctgaaagcgccatcattaccagggcaattttcgtgttccgtttcatggttaatcctccagtggttgtcttacttcgggtattgcatcttccgtgccaacgatgaaacgctgatatgacgggtaatctggcatgataaacgagtaaaaatgactcgcctgctgcgggtagcgagtcatttttactcattgaaacttaagcctttgtgttacagcgcagggtaagcgctgataaaagatggcatgatttctgctgtcagaaagggatgagcaggcaaagaagaagatgcgttttatgcaacgttctaaagactccttagctaaatggttaagcgcgatcctccccgtggtcattgttgggctggtagggttgtttgcggtgacggtgattcgcgattatggccgcgagactgccgccgccagacaaacgctgctggaaaaaggcagtgtacttattcgtgctctcgaatccggctcgcgcgtcggcatggggatgcgcatgcatcatgcgcagcagcaggccttactggaagaaatggccgggcagcctggagtacgttggtttgcggtcacggatgaacaaggaacaatcgtgatgcatagcaactccggcatggtgggaaaacagctttattccccgcaggaaatgcagcagttacatccgggagatgaagaagtgtggcggcggatcgatagcgcagacggcgagcctgttctggaaatttatcgccagtttcaaccgatgtttgctgctggaatgcaccggatgcgccatatgcagcagtatgccgcgacaccacaagcaattttcatcgctttcgacgccagtaatattgtgagtgccgaagatcgtgagcagagaaacaccctgattatcctcttcgccctggcgacggtcttgctggcaagcgtattgtcattcttctggtatcgccgctatctgcgctcgcgccagcttctacaagatgaaatgaagcgcaaagagaagctggtggcgctggggcatcttgcggcaggcgttgcccacgaaattcgtaacccgctttcctcgattaaagggctggcaaaatactttgcng

SEQ ID NO: 1648 - DNA, 4923 bp, Escherichia coli
  Strain O55:H7
  modified_base (329)..(329): a, c, g or t
  modified_base (331)..(331): a, c, g or t
  modified_base (1310)..(1310): a, c, g or t
  modified_base (1994)..(1994): a, c, g or t
  modified_base (2893)..(2893): a, c, g or t
  modified_base (3514)..(3514): a, c, g or t
  modified_base (4071)..(4071): a, c, g or t
gcgccagcagggggagaagcgcatcaactggcgcaggtgatggcgaaagaagctgaccgtttaaaccgcgtggtaagcgagctgctggaactggttaagccaacgcatctggctttgcaggcggtggatctcaacacgctgattaaccactcattacagctggtaagccaggatgcaaactgccgggagatccagttacgctttaccgccaacgacacgttgccggaaattcaggccgatccggacaggctgactcaggtcctgttgaatctttatctcaatgctattcaggcgattggtcagcatggcgtgattagcgtgacggccancnaaagcggcgcgggcgtgaaaatcagcgttaccgacagcggtaagggaattgcggcagatcagcttgaagccatcttcaccccgtacttcaccaccaaagccgaaggcaccggactggggctggcggtcgtgcataatattgttgaacaacacggtggtacaattcaggtcgcaagcctggagggaaaaggcgcaaggttcaccctctggcttccggtcaatattacgcgtaaggacccacaaggatgacgcacgataatatcgatattctggtggtggatgatgacattagccactgcactattttgcaggctttgctgcgcggctggggctataacgtcgcgctggcgaacagcgggcgacaggcgctggagcaggtgcgggagcgggtttttgatcttgtgctttgcgatgtgcgaatggcggagatggacggcattgccacgctaaaagagatcaaagcgttaaatccggcgattccggtactgattatgaccgcatactctagcgtcgagacggcggtagaggcgttgaaaaccggggcgctggattatctcatcaagccgctggatttcgataacctgcaggcgacgctggaaaaggcgctcgcgcatacgcacattattgatgctgaaacgcctgcggtgactgccagccagttcggtatggtcggtaaaagcccggcgatgcaacacctgctcagtgaaatcgccctcgtcgcgccatcggaagccacggtgctgatccacggcgattccggcaccggtaaagagctggtcgccagggcgattcacgccagtagcgcacgtagcgaaaaaccgctggtaacgctcaactgtgcggcactcaacgaatccttgctggaatctgaattgttcggtcacgaaaaaggggcgtttactggagccgataaacgccgggaagggcgctttgttgaggcggacggcggcacgttgtttctcgatgaaattggcgatatntcgccgatgatgcaggtgcgtctgctgcgtgcgattcaggagcgcgaagttcagcgtgtcggtagcaaccagactatttcggttgatgtccggctgattgccgcgacccatcgcgatcttgccgcagaggtgaatgccgggcgttttcgccaggatctctactatcgcctgaacgtggtggcgattgaagtaccatcgctgcggcaacggcgggaagatattcctctgctggctggccattttctgcagcgctttgctgaacgtaatcgcaaggcggtaaaaggctttacgccccaggcgatggatctgttgattcattacgactggccgggaaatattcgtgaactggaaaatgcggtggaacgggcggtggtgctgctgactggggaatatatttccgaacgcgagctgccgctggcgattgccagtacgccgatcccgctggcacaaagcctggatattcagccgctggtggaagtcgaaaaagaagtgattctggcggcactggagaaaacgggcggcaacaaaaccgaagccgcccgtcagttagggatcacgcgcaaaacgctgttggcaaaattgtcgcgttagttctgctcgcgttcgatagcgcgccagccgatatctttccggcagaagcagtcgtcccagtggatatcggtcattaaggcataggcgcgtttntgtgcttctgctacggtatgacccagcgcggtgacgcacagtacgcgcccgccgctggttaccacctgctcgtcatccgccagttttgtgcccgcgtggaacactttgccgtcttccacttcttccagcggcaggccgtggatcacgtcaccggtgcggtaatcgcccggatatccacccgcagccatcaccacgccgagagaagcacgttcatcccactctgacgttttctcgtctagtttgccttcacaggccgccaggcagagttcaacaagatcggacttcatgcgcagcataatcggctgggtttctggatcgccaaagcggcagttaaattcgataaccttcggattgccctgtttgtcgatcatcaggcccgcgtagagaaaaccggtgtaggtgttgccttccgacgccatgcctttcacggttggccagatgatacgttccatcgtgcgctgatgaacgtcatctgtcactaccggcgcaggagagtaagcgcccattccgcccgtgttcggcccggtatctttatcgcctacgcgtttgtgatcctggctggtggccatcggcagcacatgctcgccgtccaccatcacgataaagctcgcttcttcgccgtcgaggaactcttcgataacgatgcgatgacccgcgtcgccaaacgcgttgcccgccagcatatcgtgaacagccgcttccgcttcttccagcgtcatcgccacgataacgcctttcccggcagccagaccgtccgctttaatgacgattggcgcgcctttctcacgcagatacgccagcgcaggttctacctcggtgaagttctgatattccgccgtaggaatgttatggcgggccaggaaatctttagtaaacgctttcgagccttccagctgtgnggcgcctgcggttgggccgaagattttcatcccggcggcgcggaaggtatcgaccacgcctttcaccagcggcgcttccgggccgacgatggttagatctaccttttcgttttgcgcgaaatccagcagcgccgggatatcggtcacgccgatagcgacgttttgcagcgtgggttccagcgctgtgcctgcgttacccggagcaacaaaaacagtctcaaccagcggcgactgggccgctttccaggccagcgcgtgctcgcgcccgccgttaccaatcactaatactttcatctgtcgctccattaatggcggaagtggcgcatatcggtgaagagcatcgcaataccgtgctcgtcggcggcggcaatcacttcgtcatcacggatggaaccgccaggctggattacgcaggtcacgcccgcagcggcggcggcatcaataccgtcgcggaacgggaagaacgcgtcagaagccatcgaggaacctttcacttccaggccttcatcggcagctttaataccggcgattttcgcggagtacacgcggctcatctggcccgcgccaataccgatggtcatattgtttttggcatagacgatagcattggatttcacgaanttcgccactttccagcagaacagcgcatcacgcagttcctgttcggtcggctgacgtttggtgacgacgcgcagttcttccgcaccgaccatgcccagatcgcgatcctgaaccagcagaccgccgttcacgcgtttgaaatcaagacccggaacacgctcgccccactgaccgcaggtcagaacgcgtacattctgtttggcggcggtgattttcagggcttcttcgctggcggacggcgcaataatcacttcaacaaactgacgagaaatgatggcctgtgcggtttccgcatccagctcgcggttaaaggcaatgatgccgccgaatgcggaggtcgggtcggttttgtacgcgcgatcgtaagcatcaagaattgaattgccgatagccacgccgcaagggttggcgtgcttcacaatcacacatgccggctcggcgaactctttcacgcactccagcgccgcatcggtatcggcgatgttgttataagagagggctttaccctgaacctgggttgcggtagcaacggaggcttctttcacattctcttctanatagaaggcagcctgctggtggctgttctcgccgtaacgcatatcctgcttcttaatgaagttcaggttcagcgtgcgtgggaagcgaccggcggcttctttgctttcaccgtgataagccggaaccatgctgccgaagtagttggcaatcatgctgtcgtaggcggcagtgtgttcgaaggctttgatggcgaggtcgaaacgggttgcaagcgtcagcgatccttcgttgtcatccatctctttaataatggcgtcgtagtcgctgctcttcaccacgattgcgacatctttatggttcttggcggcggagcgcaccatcgttgggccgccgatatcgatgttctcaaccgcatcttccagcgagcaaccttcacgggccacggtctgggcgaacggatacaggttaacaaccaccatatcgataggctggatctgatgttcttccataatggcatcgtcctggccgcgacggcccagaatgccaccatgtactttcggatgcagggtcttcacgcgtccatccatcatctccgggaaaccggtgtaatcggaaacttcggttaccggcagacctttttctgctaacagacgggcagtgccccctgtagacagcagctccacaccgcgtgcggaaagtgcctgggcgaattcgacgataccggctttgtcagaaacactgagcagagcgcggcggactggacgacgttgttgcatggtaaatcccctggatttgactattacagagagcgttagctgaatttttcgcgaaaaactcagctaacgcccctaacggggcatccttatttttcgcccgcattgtaacgaaaacgtttgcgcaacgctcgcgaa

SEQ ID NO: 1649 - DNA, 742 bp, Escherichia coli
  Strain O55:H7
  modified_base (321)..(321): a, c, g or t
  modified_base (728)..(728): a, c, g or t
  modified_base (736)..(737): a, c, g or t
aattcgatggcgatcacgattttgcccccgattagcgtgggagaaatagagaaataacgctgatgattgtggataactctgtgcgtaaaaaggtataaagcggggttttgctggggaatgcagcagtcagtcatttttctgcaatttttctattgcggcctgcggagaactccctataatgcgcctccatcgacacggcggatgtgaatcacttcacacaaacagccggttcggttgaagagaaaaattctgaaattcagggttgactctgaaagaggaaagcgtaatatacgccacctcgcgacagtgagctgaaagccncgtcgcaactgctctttaacaatttatcagacaatctgtgtgggcactcgaagatacggattcttaacgtcgcaagacgaaaaatgaataccaagtctcaagagtgaacacgtaattcattacgaagtttaattctttgagcatcaaacttttaaattgaagagtttgatcatggctcagattgaacgctggcggcaggcctaacacatgcaagtcgaacggtaacaggaagaagcttgcttctttgctgacgagtggcggacgggtgagtaatgtctgggaaactgcctgatggagggggataactactggaaacggtagctaataccgcataacgtcgcaagaccaaagagggggaccttcgggcctcttgccatcggatgtgcccagatgggattagctagtangtggggtnncggct

SEQ ID NO: 1650 - DNA, 1763 bp, Escherichia coli
  Strain O55:H7
  modified_base (121)..(121): a, c, g or t
  modified_base (138)..(141): a, c, g or t
  modified_base (391)..(391): a, c, g or t
  modified_base (455)..(457): a, c, g or t
  modified_base (460)..(463): a, c, g or t
  modified_base (573)..(573): a, c, g or t
  modified_base (660)..(660): a, c, g or t
  modified_base (729)..(729): a, c, g or t
  modified_base (737)..(737): a, c, g or t
  modified_base (745)..(746): a, c, g or t
  modified_base (765)..(765): a, c, g or t
  modified_base (863)..(864): a, c, g or t
  modified_base (1149)..(1149): a, c, g or t
  modified_base (1280)..(1280): a, c, g or t
  modified_base (1284)..(1284): a, c, g or t
  modified_base (1366)..(1366): a, c, g or t
  modified_base (1554)..(1554): a, c, g or t
  modified_base (1743)..(1744): a, c, g or t
  modified_base (1747)..(1748): a, c, g or t
  modified_base (1750)..(1751): a, c, g or t
  modified_base (1755)..(1756): a, c, g or t
aggcgacgatccctagctggtctgagaggatgaccagccacactggaactgagacacggtccagactcctacgggaggcagcagtggggaatattgcacaatgggcgcaagcctgatgcanccatgccgcgtgtatgnnnnaggccttcgggttgtaaagtactttcagcggggaggaagggagtaaagttaatacctttgctcattgacgttacccgcagaagaagcaccggctaactccgtgccagcagccgcggtaatacggagggtgcaagcgttaatcggaattactgggcgtaaagcgcacgcaggcggtttgttaagtcagatgtgaaatccccgggctcaacctgggaactgcatctgatactggcaagcttgagtctcgtanaggggggtagaattccaggtgtagcggtgaaatgcgtagagatctggaggaataccggtggcgnnngcnnnnccctggacgaagactgacgctcaggtgcgaaagcgtggggagcaaacaggattagataccctggtagtccacgccgtaaacgatgtcgacttggaggttgtgcccttgangcgtggcttccggagctaacgcgttaagtcgaccgcctggggagtacggccgcaaggttaaaactcaaatgaattgacgggggcccncacaagcggtggagcatgtggtttaattcgatgcaacgcgaagaaccttacctggtcttgacatccacngaactttncagagatnngaatgtgccttcgggaacngtgagacaggtgctgcatggctgtcgtcagctcgtgttgtgaaatgttgggttaagtcccgcaacgagcgcaacccttatcctttgttgccagcggtnnggccgggaactcaaaggagactgccagtgataaactggaggaaggtggggatgacgtcaagtcatcatggcccttacgaccagggctacacacgtgctacaatggcgcatacaaagagaagcgacctcgcgagagcaagcggacctcataaagtgcgtcgtagtccggattggagtctgcaactcgactccatgaagtcggaatcgctagtaatcgtggatcagaatgccacggtgaatacgttcccgggccttgtacacaccgcccgtcacaccatgggagtgngttgcaaaagaagtaggtagcttaaccttcgggagggcgcttaccactttgtgattcatgactggggtgaagtcgtaacaaggtaaccgtaggggaacctgcggttggatcacctccttaccttaaagaancgtnctttgcagtgctcacacagattgtctgatagaaagtgaaaagcaaggcgtcttgcgaagcagactgatacgtccccttcgtntagaggcccaggacaccgccctttcacggcggtaacaggggttcgaatcccctaggggacgccacttgctggtttgtgagtgaaagtcgccgaccttaatatctcaaaactcatcttcgggtgatgtttgagatatttgctctttaaaaatctggatcaagctgaaaattgaaacactgaacaacganagttgttcgtgagtctctcaaattttcgcaacacgatgatgaatcgaaagaaacatcttcgggttgtgaggttaagcgactaagcgtacacggtggatgccctggcagtcagaggcgatgaaggacgtgctaatctgcgataagcgtcggtaaggtgatatgaaccgttataaccggcgatttccgaannggnnannccanngtgtttc

SEQ ID NO: 1651 - DNA, 93 bp, Escherichia coli
  Strain O55:H7
attaactgaatccataggttaatgaggcgaaccgggggaactgaaacatctaagtaccccgaggaaaagaaatcaaccgagattcccccagta

SEQ ID NO: 1652 - DNA, 966 bp, Escherichia coli
  Strain O55:H7
  modified_base (101)..(101): a, c, g or t
  modified_base (155)..(156): a, c, g or t
  modified_base (343)..(344): a, c, g or t
  modified_base (354)..(357): a, c, g or t
  modified_base (359)..(361): a, c, g or t
  modified_base (364)..(365): a, c, g or t
  modified_base (367)..(368): a, c, g or t
  modified_base (391)..(391): a, c, g or t
  modified_base (401)..(401): a, c, g or t
  modified_base (743)..(743): a, c, g or t
  modified_base (884)..(887): a, c, g or t
  modified_base (964)..(964): a, c, g or t
acggggaggagcccagagcctgaatcagtgtgtgtgttagtggaagcgtctggaaaggcgcgcgatacagggtgacagccccgtacacaaaaatgcacatnctgtgagctcgatgagtagggcgggacacgtggtatcctgtctgaatatggggnnaccatcctccaaggctaaatactcctgactgaccgatagtgaaccagtaccgtgagggaaaggcgaaaagaaccccggcgaggggagtgaaaaagaacctgaaaccgtgtacgtacaagcagtgggagcctcttttatggggtgactgcgtaccttttgtataatgggtcagcgacttatattctgnngcaaggttannnnannnggnnanncgaagggaaaccgagtcttaacngggcgttaanttgcagggtatagacccgaaacccggtgatctagccatgggcaggttgaaggttgggtaacactaactggaggaccgaaccgactaatgttgaaaaattagcggatgacttgtggctgggggtgaaaggccaatcaaaccgggagatagctggttctccccgaaagctatttaggtagcgcctcgtgaattcatctccgggggtagagcactgtttcggcaagggggtcatcccgacttaccaacccgatgcaaactgcgaataccggagaatgttatcacgggagacacacggcgggtgctaacgtccgtcgtgaagagggaaacaacccagaccgccagntaaggtcccaaagtcatggttaagtgggaaacgatgtgggaaggcccagacagccaggatgttggcttagaagcagccatcatttaaagaaagcgtaatagctcactggtcgagtcggcctgcgcggaagatgtaacgggnnnnaaccatgcaccgaagctgcggcagcgacactgtgtgttgttgggtaggggagcgttctgtaagcctgtgaaggtgtnct

SEQ ID NO: 1653 - DNA, 11041 bp, Escherichia coli
  Strain O55:H7
  modified_base (3)..(3): a, c, g or t
  modified_base (636)..(636): a, c, g or t
  modified_base (802)..(802): a, c, g or t
  modified_base (897)..(897): a, c, g or t
  modified_base (929)..(929): a, c, g or t
  modified_base (951)..(951): a, c, g or t
  modified_base (3669)..(3669): a, c, g or t
  modified_base (5688)..(5688): a, c, g or t
  modified_base (9547)..(9547): a, c, g or t
  modified_base (9553)..(9553): a, c, g or t
  modified_base (10365)..(10365): a, c, g or t
  modified_base (10367)..(10367): a, c, g or t
tgntggaggtatcagaagtgcgaatgctgacataagtaacgataaagcgggtgaaaagcccgctcgccggaagaccaagggttcctgtccaacgttaatcggggcagggtgagtcgacccctaaggcgaggccgaaaggcgtagtcgatgggaaacaggttaatattcctgtacttggtgttactgcgaaggggggacggagaaggctatgttggccgggcgacggttgtcccggtttaagcgtgtaggctggttttccaggcaaatccggaaaatcaaggctgaggcgtgatgacgaggcactacggtgctgaagcaacaaatgccctgcttccaggaaaagcctctaagcatcaggtaacatcaaatcgtaccccaaaccgacacaggtggtcaggtagagaataccaaggcgcttgagagaactcgggtgaaggaactaggcaaaatggtgccgtaacttcgggagaaggcacgctgatatgtaggtgaagtccctcgcggatggagctgaaatcagtcgaagataccagctggctgcaactgtttattaaaaacacagcactgtgcaaacacgaaagtggacgtatacggtgtgacgcctgcccggtgccggaaggttaattgatggggtcngcgcaagcgaagctcttgatcgaagccccggtaaacggcggccgtaactataacggtcctaaggtagcgaaattccttgtcgggtaagttccgacctgcacgaatggcgtaatgatggccaggctgtctccacccgagactcagtgaaattgaactcgctgtgaanatgcagtgtacccgcggcaagacggaaagaccccgtgaacctttactatagcttgacactgaacattgagccttgatgtgtaggataggtgggangctttgaagtgtggacgccagtctgcatgganccgaccttgaaataccaccctntaatgtttgatgttctaacgtggacccgtgatccgggttgcggacagtgtctggtgggtagtttgactggggcggtctcctcctaaagagtaacggaggagcacgaaggttggctaatcctggtcggacatcaggaggttagtgcaatggcataagccagcttgactgcgagcgtgacggcgcgagcaggtgcgaaagcaggtcatagtgatccggtggttctgaatggaagggccatcgctcaacggataaaaggtactccggggataacaggctgataccgcccaagagttcatatcgacggcggtgtttggcacctcgatgtcggctcatcacatcctggggctgaagtaggtcccaagggtatggctgttcgccatttaaagtggtacgcgagctgggtttagaacgtcgtgagacagttcggtccctatctgccgtgggcgctggagaactgaggggggctgctcctagtacgagaggaccggagtggacgcatcactggtgttcgggttgtcatgccaatggcactgcccggtagctaaatgcggaagagataagtgctgaaagcatctaagcacgaaacttgccccgagatgagttctccctgaccctttaagggtcctgaaggaacgttgaagacgacgacgttgataggccgggtgtgtaagcgcagcgatgcgttgagctaaccggtactaatgaaccgtgaggcttaaccttacaacgccgaaggtgttttggcggatgagagaagattttcggcctgatacagattaaatcagaacgcagaagcggtctgataaaacagaatttgcctggcggccgtagcgcggtggtcccacctgaccccatgccgaactcagaagtgaaacgccgtagcgccgatggtagtgtggggtctccccatgcgagagtagggaactgccaggcatcaaataaagcgaaaggccatcctgacggatggcctttttgcgttggtgcaaaaaaatgccggatgcgacgctggcgcgttttatccagcttacgcaggcacgatagggggcagcttattcccccacatacgccagatccagcaacggatacggtttccccaaatcgtccacctcagagcgtcccgtaaccttaaaacccaccttcttatagaacccaaccgcctgctcattttgctcattaacattggttgtcagttccggggccattgagagcgcatgcttcaccagcatccggcccacgccgcagccgcgcacatcaggatcgataaacagcgcatccatatgctgcccacttaacaacataaacctaaccggctgatcccgttcattaaccgcgacccacaacggtgcttccggcagaaaggaacgaaccagctcttccagctcggcccgatactctgctgataaaaaatcgtgggtggcatcgacagatcgacaccaaatcgcaacgagttcctccccttcctcatgccgtgagcggcgaatactaataaccattttctctccttttagtcattcttatattctaacgtagtcttttccttgaaactttctcaccttcaacatgcaggctcgacattggcaaattttctggttatcttcagctatctggatgtctaaacgtataagcgtatgtagtgaggtaatcaggttatgccgattcgtgtgccggacgagctacccgccgtcaatttcttgcgtgaagaaaacgtctttgtgatgacaacttctcgtgcgtctggtcaggaaattcgtccacttaaggttctgatccttaacctgatgccgaagaagattgaaactgaaaatcagtttctgcgcctgctttcaaactcacctttgcaggtcgatattcagctgttgcgcatcgattcccgtgaatcgcgtaacacgcccgcagagcatctgaacaacttctactgtaactttgaagatattcaggaacagaactttgacggtctgattgtaaccggtgcgccgctgggcctggtggagtttaatgatgtcgcttactggccgcagatcaaacaggtgctggagtggtcgaaagatcacgtcacctcgacgctgtttgtctgctgggcggtacaggcagcgctcaatatcctctacggcattcctaagcaaactcgcaccgacaaactctctggcgtttacgagcatcatattctccatcctcatgcgcttctgacgcgtggctttgatgattcattcttggcaccgcattcgcgctatgctgactttccggcagcgttgattcgtgattacaccgatctggaaattctggcagagacggaagaaggggatgcatatctgtttgccagtaaagataagcgcattgcctttgtgacgggccatcccgaatatgatgcgcaaacgctggcgcaggaatatttccgcgatgtggaagccggactagacccggaagtaccgtataactatttcccgtacaatgatccgcaaaacaaaccgcgagcgagctggcgtagtcacggtaatttgctgtttaccaactggctcaactattacgtctaccagatcacgccatacgatctacggcacatgaatccaacgctggattaatcttctgtgatagtcgatcgttaagcgattcagcaccttacctcaggcaccttcgggtgccttttttatttccgaaacacacctcagtaggtgaataaattttattcatattgttatcaataagttatcaagtattttnaattaaaatggaaattgtttttgattttgatttttaaatgagtagtcttagttgtgctgaacgaaaagcgcacaacgatccttcgttcacagtggggaagttttcggatccatgacgaggagctgcacgatgactgaacaggcaacaacaaccgatgaactggctttcataaggccgtatggcgagcaggagaagcaaattcttactgccgaagcggtagaatttctgactgagctggtgacgcattttacgccacaacgcaataaacttctggcagcgcgcattcagcagcagcaagatattgataacggaacgttgcctgattttatttcggaaacagcttccattcgtgatgctgactggaaaattcgcgggattcctgcggacttagaagatcgccgcgtagagattaccggacccgtagagcgcaagatggtgatcaacgcgctcaacgccaatgtgaaagtctttatggccgatttcgaagattcactggcaccagactggaacaaagtgatcgacgggcaaattaacctgcgtgatgcggttaacggcaccatcagttacaccaatgaagcaggcaaaatttaccagctcaagcccaatccagcggttttgatttgtcgggtacgcggtctgcacttgccggaaaaacatgtcacctggcgtggtgaggcaatccccggcagcctgtttgattttgcgctctatttcttccacaactatcaggcactgttggcaaagggcagtggtccctatttctatctgccgaaaacccagtcctggcaggaagcggcctggtggagcgaagtcttcagctatgcagaagatcgctttaatctgccgcgcggcaccatcaaggcgacgttgctgattgaaacgctgcccgccgtgttccagatggatgaaatccttcacgcgctgcgtgaccatattgttggtctgaactgcggtcgttgggattacatcttcagctatatcaaaacgttgaaaaactatcccgatcgcgtcctgccagacagacaggcagtaacgatggataaaccattcctgaatgcttactcacgcctgttgattaaaacctgccataaacgcggtgcttttgcgatgggcggcatggcggcgtttattccgagcaaagatgaagagcacaataaccaggtgctcaacaaagtaaaagcggataaatcgctggaagccaataacggtcacgatggcacatggatcgctcacccaggccttgcggacacggcaatggcggtattcaacgacattctcggctcccgtaaaaatcagcttgaagtgatgcgcgaacaagacgcgccgattactgccgatcagctgctggcaccttgtgatggtgaacgcaccgaagaaggtatgcgcgccaacattcgcgtggctgtgcagtacatcgaagcatggatctccggcaacggctgcgtgccgatttatggcctgatggaagatgcggcgacggctgaaatttcccgtacctcaatctggcagtggatccatcatcaaaaaacgttgagcaatggcaaaccggtaactaaagccttgttccgccagatgctgggcgaagagatgaaagtcattgccagcgaactgggcgaagaacgtttctcccaggggcgttttgacgatgccgcacgcttgatggaacagatcaccacttccgatgagttaattgatttcctgaccctgccaggctaccgcctgttagcgtaaaccaccacataactatggagcatctgcacatgaaaacccgtacacaacaaattgaagaattacagaaagagtggactcaaccgcgttgggaaggaattactcgcccatacagcgcggaagatgtggtgaaattacgcggttcagtcaatcctgaatgcacgctggcgcaactgggcgcggcgaaaatgtggcgtctgctgcatggcgagtcgaaaaaaggctacatcaacagcctcggtgcactgactggcggtcaggcgctgcaacaggcgaaagcgggtattgaancggtctatctgtcgggatggcaggtagcggcggacgctaacctggcggccagcatgtatccggatcagtcgctctatccggcaaactcggtgccagctgtggtggagcggatcaacaacactttccgccgtgcggatcagatccaatggtccgcgggcattgagccgggcgatccgcgctatgtcgattacttcctgccgatcgttgccgacgcggaagccggttttggcggtgtcctgaatgcctttgaactgatgaaagcgatgattgaagccggtgcagcggcagttcacttcgaagatcagctggcgtcagtgaagaaatgcggtcacatgggcggcaaagttttggtgccaactcaggaagctattcagaaactggtcgcggcgcgtctggcagctgacgtgacgggcgttccaaccctgctggttgcacgtaccgatgctgatgcggcggatctgatcacctccgattgcgacccgtatgacagcgaatttattaccggcgagcgtaccagtgaaggcttcttccgtactcatgcgggcattgagcaagcgatcagccgtggcctggcgtatgcgccatatgctgacctggtatggtgtgaaacctccacgccggatctggaactggcgcgtcgctttgcggaagctatccacgcgaaatatccgggcaaactgctggcttataactgctcgccgtcgttcaactggcagaaaaacctcgacgacaacactattgccagcttccagcagcagctgtcggatatgggctacaagttccagttcatcaccctggcaggtatccacagcatgtggttcaacatgtttgatctggcaaacgcctatgcccagggcgagggtatgaagcactatgttgagaaagtgcagcagccggaattcgccgccgcgaaagatggctacaccttcgtatctcaccagcaggaagtgggtacaggttacttcgataaagtgacgaccattattcagggcggcacgtcgtcggttaccgcgctgactggctccaccgaagaatcgcagttctaagcaacctacaaacgttgctgactgtaggccggataaggcatatacgccgcatccggcaatcggtgcacgatgcctgatgcgacgcttgcgcgtcttatcatgcctacaaccgttgccgaacgtaggctggataaggcgtttacgccgcatccggcaattctctgctcctgatgagggcgctaaatgccgcgtggcctggaattactgattgctcaaaccattttgcaaggcttcgacgctcagtatggtcgattcctcgaagtgacttccggggcgcagcagcgtttcgaacaagccgactggcatgctgtccagcaggcgatgaaaaaccgtatccatctttacgatcatcacgttggtctggtcgtggagcaactgcgctgcattaccaacggccaaagcacggacgcggaatttttactgcgcgtcaaagagcattacacccggctgttgccggattacccgcgcttcgagattgcggagagcttttttaactccgtgtactgtcggttatttgaccaccgctcgcttactcccgagcggctttttatctttagctcccagccagagcgccgctttcgtaccattccccgcccgctggcgaaagactttcaccccgatcacggctgggaatctctgctgatgcgcgttatcagcgacctgccgttgcgtctgcactggcagaataaaagccgtgacatccattacattattcgccatctgacggaaacgttggggccagaaaacctctccaaaagtcatttacaggtggcgaacgaactgttttaccgtaataaagccgcctggctggtgggcaaactaataacgccttccggcacattgccatttttattgccgatccaccagacggatgacggcgaactgtttattgatacctgtctgacgacgaccgccgaagcgagcattgtttttggctttgcgcgttcttattttatggtttatgcgccgctgcccgcagcgctggtcgagtggttacgggaaattctgccaggtaaaaccaccgctgaattgtatatggctatcggctgccagaagcacgccaaaaccgaaagctaccgcgaatatctcgtttatctacagggctgtaatgagcagttcattgaagcgccgggtattcgtggcatggtgatgttggtgttcacgctgccgggctttgaccgtgtatttaaagtcatcaaagacaagttcgcgccgcagaaagagatgtctgccgctcacgttcgtgcctgctatcaactggtgaaagagcacgatcgcgtgggccgaatggcggacacccaggagtttgaaaactttgtgctggagaagcggcatatttccccggcattaatggaattactgctccaggaagcagcggaaaaaatcaccgatctcggcgaacaaattgtgattcgccatctttatattgagcggcggatggtgccgctcaatatctggctggaacaagtggaaggtcagcagctgcgcgacgccattgaagagtacggcaatgccattcgccagcttgccgctgctaacattttcccgggcgacatgctgtttaaaaacttcggtgtcacccgtcacgggcgtgtggttttttatgattacgatgaaatttgctacatgacggaagtgaatttccgcgatatcccgccgccgcgctacccggaagacgaacttgccagcgaaccgtggtacagcgtctcgccgggcgatgttttcccggaagagtttcgccattggctatgcgccgacccgcgtattggtccgctgtttgaagagatgcacgccgacctgttccgcgctgattactggcgcgcactacaaaaccgcatacgtgaagggcatgtggaagatgtttatgcgtatcggcgcaggcaaagatttagcgtacggtatggggagatgcttttttgagtaaagcttccatataatttttctccgcaatgtatcgagggttatccgtaaagccaaagctttcagccatcttatttaatgtattaaagattaattcagcaataacccggtgacccaattcacaagccaactcaaaggcagagtatttttgtggcgctttgtgttgccaaaaatccataatatcttcagcggtaaatccaaacaggcgtgcatggtcagataaagcaagataaaccatctctacaacgttttgctgtttatgctgtatcgctgaaaacaaacctgggtattcattagaattatttgccaggaggaggggcttcatattttttttatcgaatttaaacgtattaaacagagtgggtaatgcgttaaaaatagtattaataacgttcatatgtccgcgctgcatggccataaacaaacccgtgtcgcgcgcaagacttttagcggtcagaagatctacaatatcggaagctgaaatgttaatttcctgggccaggctgggcaatgcttcaagaataactttcacgatatcgctatgtccattttgcatcgccaggtatagtcctgggcaaccataaaaatcctttgccttcaggagatcgagtacctgttctttagtcaaatgacatgtgcgaattaacaaagataacgcgtccaaaacaattttcagcatgtcggcatcaccattcgccataacatggtataaaacatggctggacgtactatttttggcactcaggaatttatacacttgttcgttatctaaatgatgtgttgcggccagtttaggtaaggcgttcagaatcgaggttacaacatttttatccttacgtgatatcgctaaaaataatccagaaaaaccatttttatcttttgcctccagaatntgcatnagattttttttcgagagtaatccttcatatcctggctctgacaatgaattaaaaatagtctcaacgatatccgcattaccataatttatagccaaatataaaccggggaggttaatactattataggcagtcaacatttctgttctatgtagttctggcattttctggagttgaatcatcagttgcttaagttggtgattctgaccaattgccattagcaaattcatcgttgcaggtgataatggaggggttatttcatccacagatccttttagcatcaatagctgttcttttggaagtgctggaattattgcaacagattggttaataacatgatcatttgaccatttcaggaggctataatctacattcataaaatccatcagtgaatagtgtttaatatcctctttactttcgctcatgattcttattttatcgttagttacattaggatcataaaccgaaaccacgtaatggatacatccttcagttgtgttctttattcttagccggaccgtcaaagcatggttatctaccaataatatggcagccataacactgaggtcatttgattccatcttgtcaaaatatgccttcataactagcccgaaatcaccgcaggcagcaacgcaacgcccctcaggacggctggaaatcaacgccaaagtctggtttttgcattttttgttgaagtgagtgagaaatttttcagctgaagagtaatcatcttgatggggtttgtagtcaacattctgataaatatcattaatatattgtgcagcaatgtgtcggcatactatacggttttgggntngccccggaaaataacattgaccattaagcttaactcttgggaattctttttcttttctatctgagtttagatttaattcttttttatcaagagcgtctgagcgttgaggtaaaatttccattaggtattcttcaaatattggagcaatggtttgagtgagtgtcgtgttttcatttttattaattatcgtaatttctttcttatcagcttgtaagacagatatggaaaacttaatgacaaaatccttgttactaaagatatggcgaccattttgtctacagttctctgagaagctttttaatagaggtgtcgccagctccttgccagaaaatttatcctcgagttctttataaaacaattcactcagggtttggtgttcatttttctgggctgtattattaatatttgcagagaaagaactacgaggaatatgagtaatcatttaaatatctcattgtttattgatgtcttgaattttaactatcagaacagtgaaaaaatttaatatgattacaactaaataaatatcataaatcgctcaatctcataatgcagccgtaaaagtttcggtggaatgagatcttgcgattttgttaataattaagtggtttgatgtttaaaaataatgctgagttaataaaagtgtgtgaagtgtatgacaataagttattttg

SEQ ID NO: 1654 - DNA, 3868 bp, Escherichia coli
  Strain O55:H7
  modified_base (909)..(909): a, c, g or t
  modified_base (1421)..(1421): a, c, g or t
caatgcgattaacagacacccttattctattaccactcaggtatgacgggcagaatattgcctctgcccgccagaaaaagtcagcgcattccaccgtacgccagcgtcacttccttcgccgctttaatcaccatcgcgccaaactcggtcacgcggtcatcggtaatacgtgaaatcggtccggaaatagaaattgcggcaaacggttcacggtgctcatcgaaaatacacgctgcaaggcaacgtagccccagcgcatgttcctcatcgtcaaatgaataaccccgtttgcgcgtttgggcgagatcttcttttaaatgcacaggagacaccagcgttgcgtgggtataggcatgtaaccctttgcggtgcagcagcttcgtcacctgttcttcgctcagttgggctaaaaaggctttacccgcaccggaagcgtgcatcggcaatttaccgccgataggcgcggacattcgcatcagatgcgtacactgtacctggtcgataataatcgcttcgtgatcgctttgatcaagcaccgccatattgaccgtttcgccagactcttccattagattgcgcaggatagggtgaacaattgctaacaaattacggctctggagaaagctgctgccgaccataaaggcatgtgcgccgattgcccagtgtcccagttcgccaacctgacgcacgaaaccctgctgttgcatcgtggttagcaggcggtgggtcgtggaattgggtaacccggcttgttgcgccagctccgtgagtgccacactgccattggattcggcaatccactccagtaatttcaggccacgcgttaaagactgaacctgtccagtcgctggtgcggtggcaacggcgggttttctgccgcgtttcgcgggaatgggtgcgaccatgacngtctcctttttctgtatcgtagaaatcattttcatttttattgttagctaatgcaatagttgctgaactgatccgatgagttaatgttgaacaaatctcatgttgcgtggtggtcgcttttaccacagatgcgtttatgccagtatggtttgttgaatttttattaaatctgggttgagcgtgtcgggagcaagtgtgagcagcaaagtggaacaactgcgtgcgcagttaaatgaacgtattctggtgctggacggcggtatgggcaccatgatccagagctatcgactgaacgaagccgattttcgtggtgaacgctttgccgactggccatgcgacctcaaaggcaataacgatctgctggtgctaagcaaaccggaagtgatcgccgctatccacaacgcctactttgaagcgggcgcggatatcatcgaaaccaacaccttcaactccacgaccattgcgatggcggattaccagatggaatccctgtcggcggaaatcaactttgnggcggcgaaactggcgcgcgcctgtgctgacgagtggaccgcgcgcacgccggagaaaccgcgctacgttgccggcgttctcggcccaaccaaccgcacggcgtccatttctccggacgtgaacgatccggcattccgcaacatcacttttgaccagctggtggcggcctatcgcgaatccaccaaagcattagtggaaggcggtgcggatctgattctgattgaaaccgttttcgacacccttaacgccaaagcggcggtctttgcggtgaaaacggagttcgaagcgttaggcgttgagctgccgattatgatctccggcaccatcaccgacgcctccgggcgcacgctctccggacagaccaccgaagcattttacaactccctgcgccatgccgaagccctgacttttggcctcaactgcgcgctggggccagatgaactgcgccagtacgtgcaggaactatcacggattgcggaatgctacgtcaccgcgcacccgaacgccgggctacccaacgcctttggtgagtacgatctcgacgccgacacgatggcaaaacagatacgtgaatgggcgcaagcgggttttctcaatatcgtcggcggctgctgtggcaccacgccacaacatattgcagcgatgagtcgtgcagtagaaggattagcgccgcgcaaactgcctgaaattcccgtagcctgccgtttgtccggcctggagccgctgaacattggcgacgatagcctgtttgtgaacgtgggtgaacgcaccaacgtcaccggttccgctaagttcaagcgcctgatcaaagaagagaaatacagcgaggcgctggatgtagcgcgtcagcaggtggaaaacggcgcgcagattatcgatatcaacatggatgaagggatgctcgatgccgaagcggcgatggtgcgttttctcaatctgattgccggtgaaccggatatcgctcgcgtgccgattatgatcgactcctcaaaatgggaggtcatcgaaaaggggctgaagtgtattcagggcaaaggcattgttaactctatctcaatgaaagagggcgtcgacgcctttatccatcatgcgaaactgttgcgtcgttacggtgcagcggtggtggtaatggcctttgacgaacaggggcaggccgatacccgcgcacggaaaattgagatttgccgtcgggcgtacaaaatcctcaccgaagaggttggcttcccgccagaagatatcatcttcgacccgaacatcttcgcggtcgccaccggcattgaagagcacaacaactatgcgcaggactttatcggcgcctgcgaagacatcaaacgcgaactgccgcacgcgctgatttccggcggcgtatctaacgtttctttctcattccgtggcaacgatccggtgcgcgaagccattcacgcggtgttcctctactacgctattcgcaatggcatggatatggggatcgtcaacgccgggcaactggcgatttacgacgacctgcccgctgaactgcgcgacgcggtggaagatgtgattcttaatcgtcgcgatgatggcactgagcgtttactggagcttgccgagaaatatcgcggcagcaaaaccgacgacaccgctaacgcccagcaggcggagtggcgctcgtgggaagtgaataaacgtctggaatactcgctggtcaaaggcattactgagtttatcgagcaggataccgaagaagcccgccagcaggctacgcgcccgattgaagtgattgaaggcccgctaatggacggcatgaacgtggtcggcgatctgttcggcgaagggaaaatgttcctgccacaggtggtcaaatcggcgcgtgtgatgaagcaggcagtggcctacctcgaaccgtttattgaagccagcaaagagcagggcaaaaccaacggcaagatggtgatcgccaccgtgaagggcgacgtccacgacatcggtaaaaatatcgttggtgtggtgctgcaatgtaacaactacgaaattgtcgatctcggcgttatggtgcctgcggaaaaaattctccgtaccgctaaagaagtgaatgctgatctgattggactttcggggcttatcacgccgtcgctggacgagatggttaacgtggcgaaagagatggagcgtcagggcttcaccattccgttactgatcggtggcgcgacgacctcaaaagcgcacacggcggtgaaaatcgagcagaactacagcggcccgacggtgtatgtgcagaatgcctcgcgcaccgttggtgtggtggcggcgctgctttccgatactcagcgcgatgattttgtcgctcgtacccgcaaggagtacgaaaccgtacgtattcagcacgggcgcaagaaaccacgcacaccaccggtcacgctggaagcggcgcgcgataacgacttcgcttttgactggcaggcttaca

SEQ ID NO: 1655 - DNA, 1256 bp, Escherichia coli
  Strain O55:H7
ggcgcaccgtctcggcgtgcaggaagttgaagccagcatcgaaactctgcgtaattacatcgactggacaccgttctttatgacctggtcgctggccgggaagtatccgcgcattctggaagatgaagtggtgggcgttgaggcgcagcggctgtttaaagacgccaacgacatgctggataaattaagcgccgagaaaacgctgaatccgcgtggcgtggtgggcctgttcccggcaaaccgtgtgggcgatgacattgaaatctaccgtgacgaaacgcgcacccatgtgatcaacgtcagccaccatctgcgtcaacagaccgaaaaaacgggattcgctaactactgtctcgctgacttcgttgcgccgaagctttctggtaaagcagattacatcggcgcatttgccgtgactggcgggctggaagaggacgcactggctgatgcctttgaagcgcagcacgatgattacaacaaaatcatggtgaaagcgcttgccgaccgtttagccgaagcctttgcggagtatctccatgagcgtgtgcgtaaagtctactggggctatgcgccgaacgagaacctcagcaacgaagaactgatccgcgaaaactaccagggcatccgtccggcaccgggctacccggcctgcccggaacatacggaaaaagccaccatctgggagctgctggaagtggaaaaacataccggcatgaaactcacagaatctttcgccatgtggcccggtgcatcggtttcgggttggtatttcagccacccggacagcaagtactacgcggtggcgcaaattcagcgcgatcaggttgaagactatgcccgccgtaaaggtatgagcgtctccgatgttgagcgctggctggcaccgaatctggggtatgacgcggactgattcacaaatctgtcacttttccttacaacaaacagggcgctcaatgagtgccctgtctctttattaatatgaaacacttatactggaaacaggctggaataatcttagccggaaaaacgaatgtcaaaaggcacagtaaagatgccagtcagcgtgtttccggtcctttggtcattcaattgcttcaggaacatataacgataaggagaacctgaactcgtgttaacgctgcttcacctgctttctgccgtcgccctgctggtctgggggactcatattgttcgaaccggcgtaatgcgcgtcttcggcgcgcgtttgcgtactgtccttagccggagcgtcgaaa

SEQ ID NO: 1656 - DNA, 870 bp, Escherichia coli
  Strain O55:H7
gctcgccttttgcgcggggatcggcgttaccgcactggtacagagcagtaatgccaccaccatgctggtgacctcgttcgtcgctcaggatctggtagccctcgcaccggctctggtcattgtgctgggggcagatgtcgggacggcgctaatggcgcgtattctcaccttcgacttatcctggctgtcaccgttacttatttttatcggcgtgatttttttcctcggacgcaaacagtcacgcgccgggcaactgggccgcgtcggtattggtcttgggctgattttgctggcgctggagttgattgtgcaggccgtaacgccgatcacccaggcaaacggcgttcaggtgatctttgcctcgctgaccggcgatattctgctggatgcgctgattggcgcgatgttcgccattatcagctactccagccttgctgctgtactgctgaccgcgactctgaccgccgcaggcattatctccttccccgtggcgctctgtctggtgattggtgctaacctcggttccggcctgctggcgatgctcaacaacagtgccgccaatgccgcagcccgccgtgtcgcgctgggtagtctgctgtttaagctggtgggtagcctgattatcctgccgtttgtccatttgctggcagagacaatggggaagttgtcattgccaaaagcggaactggtgatctatttccacgtcttctacaaccttgtacgttgcctggccatgctgccatttgttgacccgatggcacggttttgcaaaacgattattcgcgatgaaccggaactggatacccagctacggcctaaacatctggatgtcagcgcgctggatacgcccacgcttgctctggcgaacgc

SEQ ID NO: 1657 - DNA, 27889 bp, Escherichia coli
  Strain O55:H7
  modified_base (10)..(10): a, c, g or t
  modified_base (4767)..(4767): a, c, g or t
  modified_base (5782)..(5785): a, c, g or t
  modified_base (5933)..(5933): a, c, g or t
  modified_base (6843)..(6843): a, c, g or t
  modified_base (7413)..(7415): a, c, g or t
  modified_base (8678)..(8678): a, c, g or t
  modified_base (10679)..(10679): a, c, g or t
  modified_base (12795)..(12795): a, c, g or t
  modified_base (13777)..(13777): a, c, g or t
  modified_base (15266)..(15266): a, c, g or t
  modified_base (15585)..(15585): a, c, g or t
  modified_base (15841)..(15841): a, c, g or t
  modified_base (17029)..(17029): a, c, g or t
  modified_base (17099)..(17099): a, c, g or t
  modified_base (21512)..(21512): a, c, g or t
  modified_base (22083)..(22083): a, c, g or t
  modified_base (23058)..(23058): a, c, g or t
  modified_base (26786)..(26789): a, c, g or t
  modified_base (27356)..(27356): a, c, g or t
  modified_base (27562)..(27562): a, c, g or t
aaaccctgcncattggcgacgccatggaacagatgatggaagggctgaataaagtgatgcacggcgagccaaggcaggagaaagagctgcgtaagctggcagatgatatcaacgttctctataccgccattaagctgtatctggcgcggatgccaaaagaggaactggcagaagaagagtcgcgccgctgggcggagatcatcgaaatgtcgctcaaccttgaacaggcctccgatatcgtcgagcgcatgggtagtgaaattgccgacaaatcgctggctgcaaggcgagcattttcgcttgatggcttgaaggaactggatgcgctctatgagcaattgctcagtaatttaaagctggcaatgtcggtgttcttctctggcgatgtcaccagcgctcgtcgtttgcgccgcagcaagcatcgctttcgcattcttaatcgccgctattcccacgcccacgtcgatcgcctgcatcagcaaaacgtgcaaagcattgaaaccagttcgctacatttaggcttactgggagatatgcagcgtctgaactcgctgttttgttcggtggcttacagtgtgctggaacagcctgatgaagatgagggacgggacgagtattaatattgtgaatcctgtaggcctgataagacgcgtcaagcgtcgcatcaggcactatgaacaagatgccggatcatgcatccggcaattcacttaaaaacggtgaccagcttccagcggaaccgcttcttcaccggccttaaacacataggtggtattcgggccacccagcgttgcgtgacctttactcactgtgatccagttaccttccggtagaccaataatcgtcagttctggcgcgacgaccagcagttcgcgaatacgctgctcacgggtttcacctttatggccttccggcagcgcgttggtgaagtgcgggttgatttgcaacgggaacagatttagcgcatcgaaaccttgcggatcgacaatcggcatatcgttggtggtacgaatggttgggcaagcaaggttagcgcctgcgctccagccaatatacagcgcgccacgtttaaccacgtcagtaattggagccagcagcccgcgctcgcggcactgtttcagcaactggaaagtattaccgccgccgacaatcacaatttccgcattttcaatcgcggcaacgggatcgacaacgctatgaataccggtgacagaaacacccagcggagcgagaaccgcagccgttttcgctgtgtaatcatcccaggtctgcgttacgccagcgaaagggataaacaccgctgagcggcgaccctgcaactgttcagcaatcagcggcagtgcatgttccagccaggctttacccggcagcgtcgagttactcaataaaagcagttccattacttctctggttagtaagaaatcacggaaggcatgctaccactgcgaatttaaccacttactgacatggctcacgatgtcacgtattgcaccgggcgctgagactgatgacaaacacagcattgcctgatgcgctacgcttaccaggcctaccagataactgcaatatattgaattttcgagattatgtaggccgaataaggctttattccgcatccggcataaacaatgtgtactttgccaccaatttgagcgccccttaaggcgctgatgtttttttatccttctcgtgcacattgggccgcttcagcaatcagccgcacatcaggtcgcgaagttgccgcggtgaccagccagcgacatgcagagttaagtagcgcgattaatcatgggaaattgcctctgcatgagtgagcagatattgctccgcctcaccggaccagatcccctgatgacgcgccagaatcgccgccagtgcttgatcctgaatctgcgtgagtgacgtcagcggcaggtatttcccggtatacaccagctttttgccgccgccgacggcaggcaattcaagcgtggtttcgcccgcggcattcagcccaagaatatgtgttaccacttttgcggcctgcacttttttctcttcaatcaatttgaccgctgcgcgcatgtcgtcggtattgccgcctgacgtgcccacgtagtgggtaaatgcataatgcacatcgtagaaattaattggcgcgctgaaatgtttatcctgcggtccggcgaagaaattcaggcaaccatctgtcgccagcaaggaagaggcgagagtcaccagtccttcattaggcacaaagacgaaaatatcatcgaagccgtgaccgccactcagcgccattagcgtatcaaatgctgcatcggcggcattgagataatgaatcagtgtttgcggttctgatggatagtgcttgcgcgcataactcaatttatcgttgtcggtatcggtaatgacgagcagcgacgggttaacgggtccatgtagcgcataatcaatcgccaacagtcccattggtccggtgccgccgaggatcagcatgcgcccttgcgggcgaatccccatcgtgtggttataactaccttcctgaagatgatagttggcgttgaacgcgccaatcacgcaggaaagcggttcaaccagcgagccttcaaaataggtttcgccgtcgtatgccagcaggcaatcttgttccatgacctcgttgggaataaccacatgcgtggcctcgccgcctacccacgggaaggagtagccggggcagtccgggcggtcggggagttgcaggttggcctgaatcacataacgctgacccggctggaatttgtgctgccactttttacccacggccagaatatcgccgcaaaactcgtggccgatgatgattgggttggtcgccacatcgtcgggtacttttttatggttttcacccagattggcctctttccaggaagagaggcacaggctgtcagtgaccaccgtcgcgaggatttcatcctcctgcatttcaggaaggtcaaaggtttccaggcgtaaatcacgtttaccataaagacgcagagctgttgttttcataaaccacctcatgttgaacgatggccccggcagtcgtgccggggcgaagaatcaggacaggaagcccagcgcattgccgataatccctaagccaaacagggcgaaaatcagccataccgggttaatttttttgttgagcagacgaaccatcagtagcgtcagaccgagcgccagcaaaccagggcaaagttgatcgagaatgttctgcacggtcatggtgacggtggagccatcggcggcatgcgtttgtgaaaccaccaacggtacgttgattgacgtccatttggtgaccagcacgcccatcacaaacagtccgagaatcgacgcgccttcggtgagtttttgcagcacattcccgcccatatcgctgacgatattcacccctttgcgaaagccgagctgtaggccataccacttcatcgccagacgcaccgcgttgaaaataaagaagaacagcagcgggccgagaatgttgccagacagcgccagcgatgcgccgagcgcggcggtaatcgggcgcagcgttccccagaccagtggatcgccaacccctgccaatggtcccatcagaccgactttgatgccgttaatggtgccgtcatcaatttccgcgccgttggcccgcgcctcttccatggcggcagtgacgccgatgaccgggccacatacggctggcgtggtattaaagaacaccaggtgtcgcctgagcgccgcaacctgatcctcttttactgggtaaagtcgcttgatggcggggatcatgtcgtagcaaaaacccagcccgtgaatacgttcaaagttaaaggacgcctgttgcaggttggagcgcagaaacatgctcaccagatcgccgcgtgtaatttttctctgttccatgatggctccgttaatcgtcaagttggtcaagggcggtggaagcgggggccaggagttgaggttcagctttacgccactgtggatttagctggatgtagaccagggccatgatcacgccgacgccaccgaacgccagcagactgagatcgaggtagccacctgcgaggaaaccgaggaaaaagaaaggcatcaaatatttcacgcccatcatacgtagcaccatggcgtaaccgactaccacgataaaaccgccagcaatttgcagacctcgggtcacaaattcgggaatggcgtttaacatattgctcaccatatcggcgctgacgaacagcgagacaatcagtgccggaatggcgacgcgcagcgcctgcacgccaagcgcggagacatgcagaatatcgagagtgcgaaaccgtgcttcttccgctgctttatccgccgcgtgctggaacactacggtgatggtacgggcaaacaccgtcagcacctggcctgccgcagccacaggcaacgcgatggcgattccggtggcgatgctttgctgaccaacgataaccagaatggcggagattatgctggcgagtgcagaatccggagattgcgccgcgccgacgttcatccagccgagagctatcaattccagcgtaccaccgagtattattccggtttttaaatcaccgagaattaaaccaatcaccgtacaggcaattaacgggcgatgagtctgaaattcatccagcacgctgcccattccggcaatacaggaaaaaagaaatatagcaatgatttgtagggtacttatttccatgatttgtcaccttttaagtgtcgtcatccctgcctgttaaagcatatgtacacaggcgctattatttaatntgcgattaactgttcgtttattttgtagataatattgattgagggatctgacgctacgacgcgtaaatccagtatgacgcctagattatttaactcatgaaatgcgttaatatcatcatcatctaatgaaaccgctttggttaactgttttttaccgggccgccaggccatgccgccaatattcagggtgcctatttttaccccctggcgaaccatcgctaaggcatcctgtgggcgagtgaaaagataaaaaacggtttcgtcctgatattgcgggttgtgataaaccgcgacggctttttcaatattgaccacgttaaccttcattcccggtggcgcagcctgacgcaataatgtccggcgaacttcatcgttataaacttcgtcattgcagataataatgcgctgggcgttagccactttcgaccagacggtagtgacctgaccgtggatcaggcggtcatcaatgcgggcgagcgtaatgttcatcagaaatcctcctctgtcgttgccagttgtttccagacaacgcaggtttgctttgcgatttgcgtcaggtgttcacacagttcatcaacattcatgctgtcctggttatcaaccagttcgagcgccagcggcagagaaagtccgctgattacccgcagacgaggattgcgcatcgcaagcatcgctgccgcattccacgggctgccgcactgtaaatccacggcaatcagccactcattttgattgtgaatgcttactaacttttccagctttgctacgatgtctccggcgttttcaccgggcacaaattcaacggcttcaacattggcgttgccgtaaaccatctgaaccgattccagcatggcgcaagctaatttgccgtgggcacaaaaaatggcgttgaccataaagcctccttagccgcgcgttttgccgcccgcaatgttagtggttactccggtgatatagctggcgcgttcagacagcagataacaaacaaaatcagcgatttctgctaatcttccgnnnngcccaataggaatggcgtttttggtatagccttcacgcagctgctcgacggtgatattgcgcgtccacgccagcgcctcttcatattccggcgtgcgtagcccggttttttccagaatccccggcgcgataccgaccacacggatacngtgtttacccagctctttcgaccaggagcgcgtgaagctattgagcgcggctttggtagcggcgtaacagctttggccttctgagccttccagcccactttctgaggaaacattcacaatcacgccatcatgttgtttgaccatctgtcgcgccaccgcctgcgacatcagaaaaacgcctttctggttgatattgaccattttttcgaatgcagcttcgttgagttcatactgcccggcaggcgctttctcatcgaccagcagacgcgggaaattgaccccggcgttattgaccagaccgtcgatgcgaccaaaacgctggataatttccgctaccgtatgatttacctctttggcgctggaaatatcggtcggccaaaactgatagcctttatgaccttcatattgtccatcgccaccgtgaatatctaccatctgtacgtttgcgccttgtgctaataattcctctacaatcgccagaccaataccggatgcgccgccggtgacgataatgattttatcctgcaaatttaaccacgtttgcataacagactcctgattttagataatagggacccgccgtaatttttattacgataaacatcgggaagatttttatttcagtaatagttcagctgtgctgctattcgttaccagacaattaatatattttccacgcagtgcaccaataattccgctgtatttttcttcactcatggcaatgccaatggaatatcgtgcctgctttaatttattcatttcgatagagagtgttttttcgctcatattcgtttcaaccatttcgccgtgaatatcaaaaaagcgcgagcaaatatcgccagcaacctggcgggcattcaggtcgtcactctcttcaccaccataaaacgcatgccagttagcgccgtcncgaatggccggtgagccaattcccaccagggcgacatccagattatcccagtaggcagagatggttttaaagtgctgagactgcatgatcccattacgaattaatgggttatccagtagagccggaaaatccgcgagatgcgattcccctttcagcttcgctgccgcgctgtaggttaatgtgtttacgtgatagcggctttcgagtttaccggacggtccgccaataattggtacgcagattaactgccgcgattgccccgcctgcggcaagttttcaaccagtgcgctcaccgcgcgaccccaggaaaaaccgacaatatcgccaggctccagcaagcgatccagcagttgcgcgccgtgtaaccccatcatcgccagttgagtctcttcatcctcatcatttcccgacaccaccacaacgtctttcaggccaaacttttgcttcagttgctgctccagccagagattttcgttgtagtcatagttgatggcgatggtgacaattccctgatcgcggcctcgtttaagcaagcggctgatggtggtgcggtaaatacccagttcgcgnnngatttgcgcctgcgtcatatcctgttcgtaatagagttgggcaatcttcacaatcaaacggatatcgtcactgttttccattgccgcctcctggttctgcacatttgtgcaaatacgctttctcaccgcttgatctgatataaccccatcatgatggcctttcaaagcgatttttcactctttgcatggggagaaatagcgctttctcttgcacatttgtttctctgcgcagtagttatcagcacaggtgtgcagcgattcgtaatatgttgattatccttattttgccacgcaaatttgcattgtacttccggagacacttttgtgataaaaggcgtggcagatcacatttaatttcgacgttgccgcataaccctgtttttccccgctaagaggtacggtatattccgcgttttacaggagaatttatgctgcccgactcatcagtccgtttaaataaatacatcagcgaaagcggaatttgctcacgccgcgaagcggatcgctatatcgagcaaggcaatgtgttccttaatggcaagcgagccaccattggcgatcaggtgaaacccggcgacgttgtgaaagtaaacggtcagttgattgagcctcgggaagccgaagatttggtacttatcgccctgaacaagcccgtaggcattgtcagcaccaccgaagatggcgagcgcgataacattgtcgatttcgttaaccacagcaaacgcgtgttcccgattggccgcctggataaagactcccaggggctgattttcctcaccaatcacggcgatctggtgaataagatcctccgtgcgggtaacgatcatgagaaagagtatctggtgacggtcgataaaccgattaccgatgaatttattcgtggtatgggggcgggggtgccgatcctcgggacggtgactaaaaagtgcaaagtcaaaaaagaagcgccgtttgtcttccgcattaccctggtgcaggggctgaaccgtcagatccggcgcatgtgcgagcatttcggctatgaagtgaaaaagctggaacgtacgcgcattatgaacgtcagcttaagcggcattccgctgggggagtggcgcgatttaaccgacgatgagttaatcgacctctttaagctcatcgaaaattcctcttccgaggcaaaacctaaagcgaaggccaaaccgaaaacagcgggcatcaaacgtccagtcgttaagatggaaaaaacggcggaaaaaggcggtcgcccggcgtccaacggtaagngttttacctcgccggggcgaaaaaagaaggggcgctaatcagcgcctgccgcgcgtcgacgtatttgctgaccagctaaatgacgcttcaggatccggtttataagcctgctttttctttaactggcgggcttttttcgcttcagcctcacgctcgaccattaatttatcgatgtactctttcttaatgctgttggtttcggagttggtcagtacgcgaccatgcgcaatccgcgcccgatccagcagtgttttaagttcacgctgctcgcgttcagtcatctctttttgggtaatacgggggagtgccatgatggtgccctcagtgagccagagagttcagtgtacgggaattcgtttgcgagcagaactgataatattcattttgccttctcttaactatttatctctttcgataattaattagagatgcagataaaaaaattaaaggcaattattctccgataaagacgctggttaacagagtacaggctcgtttattgatgagcatagtgacaagaaaatcaatacggcccgaaatatagcttccaggccatacagtatttactcaaacaaattactatgcagtttttgcaccacctgctcggcatcttcgccgggcaccaggaagcacaggttatggctggatgcgccgtaacaaatcatgcgaatgttgaacggttccagtacgccgaatacctctttgccaacgccgcaggcttttgacaggtcattgccaatcaacgcgaccagcgccagaccttcttccacctccacccggcacagtgcggaaagctccatcagcagagattgcgtcagcaacgtatcgccagtggaggttgaaccggtggtatcaagggttaatgccacgctcacttctgacgtggtgattaagtctaccgaaatattatgccgcgcgaggatgccgaaaacttccgcgaggaaaccgcgagaatgcagcatattcaggctgtgcaaagtgagcagagtctgattgcgacgaagcgccagcgcgcggaacagcggcggattttcagttttattgcacaccagcgtaccacctgcgcgtgggtctttgctggagccgacaaagactgggatatcgctgcgtactgcgggtagcaacgttgccggatgcagtacttttgcaccaaaagttgccatctctgccgcttcggcaaacgcgatttcatcaatgcgttttgctgcggaaactacgcgtggatcggtggtgtagatgcccgggacgtcggtccagatatcaacacgagatgcgtgtaaagcctccgccagcaaggctgccgtataatcgctgcctccacggccaagcgtcgttgtacgacctttattttcgctaccgataaatccctgggtgatcactaagccttcattgagacgtgggagcagctgcagcgcggccagttccgccagcgcggctacatctggctctgcacgaccaaatcggtcgttggtacgcatcactttacgtacatcaaaccactgtgcctgaacatcgcgttcgcgcaggatctcgacaaacagcagggtcgacatcagctcgccgtggctgaccagttcatctgtcagcgccggagacgttgccagcgccgccgcttctgccagaacagtaatgttctccagcagacgttcaatctcttcacggataacgttcgggtaacgcagacgttccagaatggcaaactggatgttgcgaatagcgtcgagtttttcgaatcgctcgccaggttccagtccttccgctaaagcgaccagcagattagtgataccagcagaagccgagaggacaactaaacgcacgttggcatcagaaagcacaatatcagcgctgcggttcatggcgtcaaaatcagctacgctggtaccgccaaatttggagacaacaatttcagacataactacctcgtgtcaggggatccattttcagccttggcacaagggaagagcggaagacgggtgggcgcagagcgatacttcgctactnttttcacccagaagtgctccaccacttgcgaaacgcccgactgcgaacgcttctggtgacaacccaggggattcagcccctgtagccgatgatgaacgtggccagccgttcaatcacctcggcgatgcaccccctcaggtgttatcacaggactggctcctccaacaccgttacttgggcaacgcgcctcttctggcctgcgctagcgcaggtagtacatttataaataaagggtgagcggggcggttgtcaacgacggggtcatgcggatttttcatccactcctggcggtcagtagttcagctaataaatgcttcactgcgctaagggtttacactcaacattacgctaacggcactaaaaccatcacatttttctgtgactggcgctacaatcttccaaagtcacaattctcaaaatcagaagagtattgctaatgaaaaacatcaatccaacgcagaccgctgcctggcaggcactacagaaacacttcgatgaaatgaaagacgttacgatcgccgatctttttgctaaagacggcgatcgtttttctaagttctccgcaaccttcgacgatcagatgctggtggattactccaaaaaccgcatcactgaagagacgctggcgaaattacaagatctggcgaaagagtgcgatctggcgggcgcgattaagtcgatgttctctggcgagaagatcaaccgcactgaaaaccgcgccgtgctgcacgtagcgctgcgtaatcgtagcaataccccgattctggttgatggcaaagatgttatgccagaagtcaacgcggtgctggagaagatgaaaaccttctcggaagcgattatctccggtgagtggaagggttataccggcaaagcaatcactgacgtagtgaacatcgggatcggcggttctgacctcggcccgtacatggtgaccgaagcactgcgtccgtacaaaaatcacctgaacatgcactttgtttctaacgtcgatgggactcacatcgctgaagtgctgaaaaaagtaaacccggaaaccacgctgttcctggtagcatctaaaaccttcaccactcaggaaaccatgaccaacgcccatagcgcgcgtgactggttcctgaaagcggcaggtgatgaaaaacacgttgcgaaacactttgcggcgctctcaaccaatgccaaagccgttggcgagtttggtattgatactgccaacatgttcgagttctgggactgggtcggcggtcgttactctttgtggtcagcgattggcctgtcgattgttctctccatcggctttgataacttcgttgaactgctttctggcgcacacgcgatggacaagcatttctccaccacgcctgccgagaaaaacctgcctgtactgttggcgctgattggcatctggtacaacaatttctttggtgcggaaactgaagcgattctgccgtatgaccagtatatgcaccgtttcgcggcgtacttccagcagggcaatatggagtccaacggtaagtatgttgaccgtaacggtaacgttgtggattaccagactggcccgattatctggggtgaaccaggcactaacggtcagcacgcgttctaccagctgatccaccagggaaccaaaatggtaccgtgcgatttcatcgctccggctatcacccataacccgctctctgatcaccaccagaaactgctgtctaacttcttcgcccagaccgaagcgctggcgtttggtaaatcccgcgaagtggttgagcaggaatatcgcgatcagggtaaagatccggcaacgcttgactacgtggtgccgttcaaagtgttcgaaggtaaccgcccgaccaactctatcctgttgcgcgaaatcactccgttcagcctgggtgcgttgattgcgctgtatgagcacaaaatctttactcagggcgtgatcctgaacatcttcaccttcgaccagtggggcgtggaactgggtaaacagctggcgaaccgtattctgccagagctgaaagatgataaagaaatcagcagccacgatagctcgaccaatggtctgattaaccgctataaagcgtggcgcggttaatcatcgttcatgcctgatgccgctatgtangccggataaggcgtttacgccgcatccggcaactggtgcctgatgcgacgctttacgcgtcttatcaggcctacaggtcgatgccgatatgtacatcgtattcggcaattaatgcatagcacgattaattaaataaccttaaaaacaatgccgactataagtcggcattgttttatcagataaatccccttgtctgtgatttaacggaaatcataccgtgaggttaatcctaaaatagatttttaatcgtgattgatttcggaaaatactcagattaattacttttacttttattttaacactatgatttttaatgttatttatatataagttgtagcttatatttgatattcattccaattatcctaaaaccccatctctaattccccgcgccgtaattcgcatgctttagttgtgtatactcgatcccgcccgaaatgtttttgggtaaatctccattcattcaatgaagggaaattgttatgaaaaaagttctgtatggcatttttgccatatctgcgcttgcggcgacttctgcgtgggctgcacctgtacaggtgggcgaagcggcagggtcggcagcaacgtcggtttcggcggggagttcctccgcgaccagcgtcagcaccgtaagctcggcggtgggtgtcgcgctcgcggcaaccggtggcggtgatggttctaataccgggaccaccacaaccacgaccaccagtacccagtaataaagtatgtatccccaaaataattcgagtcattgcatctgtggctagaagtatgaagggatttaccataaccacactccggtgtggttattctgcccctctggagaagagtcgtgaagcgacctgcattcattcttatctgcctgctattacaggcctgttcagccacgactaaagagctgggcaattcactgtgggacagtctgttcggcacgccaggcgtacagctgacggacgatgatattcaaaatatgccntacgccagccagtacatgcagcttaatggtgggccgcagttgtttgtggtgctggccttcgctgaagacggacaacaaaaatgggtcactcaggatcaggccactctcgtcacacaacatggtcgtctggtgaagactttgcttggcggcgacaacctgattgaagtgaataaccttgccgccgacccgctgattaaacccgcacaaatcattgatggcgcaacctggatgcgcacgatgggctggaccgagtaccagcaggtacgctacgccaccgcacgctcagtcttcaaatgggatggcaccggtaccgttaaggtcggcagcgatgaaaccgcggttcgcgtgctggacgaagaagtctccaccgaccaggcgcgctggcataaccgctattggatcgacagcggagggcaaattcgccagtcggaacagtatctcggcgcggattatttcccggtgaaaaccactctcatcaaggcggcaaaacaatgattaaacaaactattgtcgcgttgcttttgagtgtgggagcgtcatcggtcttcgcggcaggaaccgtcaaggtgttcagcaatggcagcagtgaggccaaaacgctaacgggcgcagagcatttaatcgatctggtaggccaaccgcggctggcaaacagctggtggcctggtgcggtgattagcgaagagctggcaacggcggcagcattgcgtcagcagcaggcgttgctgacacggctggcagaacagggcgcagattccagcgccgacgatgccgctgcgattaacgccttacgccagcaaattcaggcgttgaaggtgacgggcaggcaaaaaatcaatcttgatcccgatatcgtccgcgttgctgaacgcgctaacccgccgttgcagggcaactacacgctgtgggtcggaccaccaccgtccacggtcacgttgttcgggcttatcagccgtcctggcaatcagccattcactcccggtcgcgacgtggcgagctatctctccgggcaaagtctgcttagcggtgcggatcgtagctacgcgtgggtggtttacccggacggacgcacacaaaaagcgccggtggcttactggaacaagcgtcacgtagagccgatgcccggcagcattatttatgttggcctcgcggactccgtctggagtgagatgcctgatgcccttaacgccgacattcttcagactctgacgcagcggatacctcaataatgaaaaaaagacatctgcttagcttactggcgctgggcattagcacagcttgctacggcgaaacatatcctgcgcccattggtccgtcgcagtcggatttcggtggcgtaggattattacaaacgcccacggctcgcatggcgcgggaaggggagttgagtctgaactatcgcgataacgatcagtaccgttattactcagcttcagtgcaactcttcccgtggctggaaacaacgctgcgctacaccgacgtgcgcacncggcagtacagcagcgtcgaagcgttctctggcgatcaaacgtataaagataaagccttcgatctcaaactgcgtttgtgggaagagagttactggctgccgcaagtggcggttggtgcgcgggatatcggcggtacggggctgtttgatgcggaatatcttgttgccagcaaagcctgggggccgttcgattttacgcttggcctgggctggggatatttgggcacaagcggtaatgtgaaaaatccgctctgttcagccagtgataaatattgctatcgcgataacagctacaaacaggcgggatctatcgacggtngccagatgttccacggtcctgcctcactgtttggcggcgtggaataccagacgccctggcaaccgctgcgcctgaaactggagtatgaaggcaataattatcagcaggattttgccggtaagctggagcaaaaaagtaagtttaacgtcggggcgatttatcgcgttaccgattgggccgacgttaaccttagctatgaacgtggcaacacctttatgtttggcgtcacgctgcgcaccaactttaacgatctgcncccgtcttacaacgataacgcccgcccgcaatatcaaccgcagccgcaggatgccattttgcagcattcggtggtggcgaatcagttaacgctgttgaaatacaatgccggacttgccgatccgcagatccaggcgaaaggcgatacgctgtatgttaccggcgagcaggtgaaatatcgtgattcgcgcgaagggatcgttcgtgctaatcggatcgtgatgaatgatctgccggatgggatcaagacgatccgcgttacggaaaatcgccttaacatgccgcaggtgacgacggaaacggatgtcgccagcctgaaaaatcatctcgccggagagccgttgggccacgaaacgaagctggcgcaaaaacgcgtcgagccagtggttccgaagtccaccgagcagggctggtatatcgacaaatcgcgctttgatttccatatcgatccggtgctgaaccagtcggtcggtggcccggaaaacttttacatgtatcagctgggcgtgatgggaacggcagatttgtggctgacggaccatctgctgaccaccggcagcctgtttgcaaatcttgccaacaactacgacaagtttaactacaccaatccgccgcaggactcgcacttaccgcgcgtgcgtacccatgtgcgcgagtatgtgcagaacgatgtctatgtgaataacctgcaagccaactacttccagcatctgggcaacggcttctacggtcaggtctacggaggttatctcgaaaccatgtttggcggtgcgggggcagaagtgttgtatcgcccgctggacagcaactgggcgtttggtctggatgccaactacgttaaacagcgcgactggcgtagtgcaaaggatatgatgaaattcaccgactacagcgtgaaaaccggacatctgaccgcctactggacgccatctttcgctcaggatgtgttagttaaagccagcgtcgggcagtatctggcaggggataaaggcggcacgctggagatcgctaaacgctttgacagcggcgtggtggtgggcggctatgccacgatcaccaacgtttcgaaagaggagtacggcgaaggggacttcaccaaaggcgtgtatgtctctgtaccgttggatctcttctcgtctggcccgacacgcagccgtgcggcgattggctggacgccgctgacgcgtgncggtggtcagcaacttgggcgtaagttccagttgtatgacatgaccagcgaccgtagcgtcaatttccgntaagtcatgggaaaggtgccagttttcgcaatcactggcacctttattcttaatggcctgttgagccatcaggaacgcagttcacccccggtttgcgatctggtgtgtaaaggcgaaaacattctgtcttcctgtccgtcgatatcggttgcaggtctggttgcctgagcgactgggccatcattgggctggagacattgctttgcggtaggtcggctttatcagcagtaccgagcggaccagcataagcaggaagaacagagactgataacatcaaagcagcaaaataaggcttcatttttaccacctttatcaggttacgtttcatttgttccagaggaacattgtcgatttttcgcgcattgctggtggctgggaatcacctgaatgggtgatttttgaattaccggctttggtgcggtttgtcttgccggatgcgccgccaggcgcggcttatccggcctacgggtaggtatatccggctttggtggaggcgcgctccaaatccaggttgaacaaaacatacacaaaaaatatagatctccgtcacatttttgcgttatacaggaagctcgccactgtgaaggaggtactgctatgacgtcactctctcgtccgcgcgtggagtttatctccaccattttgcagaccgtactcaatcttggcctgctgtgcctcggccttattttggttgtcttcctcggcaaagaaacggtgcatctggctgatgtgctgttcgcgccagaacaagccagcaaatatgagctggtagaaggactggtggtttactttctctatttcgaatttatcgcgctgattgtgaagtactttcagtccggttttcacttcccgctacgttactttgtctatattgggatcaccgccattgtgcgcttgatcatcgtcgatcataaatcgccactggatgtgttgatctactcggctgcgatcctgttactggtggtcaccctgtggctgtgtaattcgaaacggctgaagcgggagtaaaaagacagcacgccgaactggcgcggcgtgctggacaggaagattacagcgtagcagtttgttgtgttttcttcgtttccggttcccagagggcttccagctcctcaagggttttacctttggtttccgggacaaatttccacataaacagtgctgccagaacgcccatacaaccgtaaatccagtaggagaaaccgttgtggaaatgggccaccagccaggagtttttgtccatcatcgggaaggtccaggagacgaagtagttcgccagccactgggccgccaccgcgattgccagcgctttacctcgaatagcattcgggaagatttccgacagcagtacccagcataccggaccccaggacatggcaaaggcggcaacatagaacagcatcgacagtagcgccacaatacccggtgcctgagtgtaaaacgcggtaccgaggctaaacataccgattgccattccgagtgcgccgataatttgcagtggcttacgaccaaatttatccaccgtcataattgccagaacggtgaaggtgaggttgataactccgacaataatggtctgcaacagcgcgatatccgtgctggcccccagcgttttgaacacttccggcgcgtagtacagcaccacattgatgccgacaaattgctggaagatggagagcataacgccgatgacaatcacgcccacgccaaacatcagcagacgaccaccggttttgcggccatgatccagggagtgtttaatttcctgtactgcctgagttgcaagcgtgttgcccataattttgcgcaggataccttccgcctgttcttgcttgccgcgtgacatcagccagcgaggactttctggcacggtatacagcagcattaagaacagcagtgcagggatacattccgaggcaaacatataacgccagccgtcagtattcagccagctggcatcaccggaacgcgcaataaaatagtttacgcagtaaactaaaagctgcccgaaaataatcgcaaactggttaaatgaaaccagtttcccgcgaatatgagcaggagcaagttccgcaatatacattggtgaaagcattgaggctaaaccaacgccaataccgccaataatacgataaataacaaattccgggacataacctgccagataaacaggcactgtgttgtccgggtttatagaggtaaaaccaagttctggccaggcagaacctacaccagaaataaaaaacaggacagcagcaatcttaagtgaatcacgacgaccgaagcggttactgcaataaccaccgagggcaccgccgatgatgcaaccaatcagagcgctggccacgcaaaaccctaacagggagttggcagcggattcacttaagttttgtggagcaacaaagacggtattgagtgactcaacagtaccggaaataacggcggtgtcgtagccaaataataaaccacctaatgtagcgactaaggtaatcgaaaatatataactggaattatactgggtattcattcagacctgccttagaccattctgatcttttatcagtgcattgatgttggaattgtcaggcagttaaggcaattatcattttttacaatgcgtttacgtaatgtcttttctgtgatcttaattgtgataattatccaaaattgataaaaacaatactattgccgtgactcagagcacgaaagagaattatcgtaagtgggaaaacaaataacgtaaaaataataagctctatgatggaaatattaaccggcgaacaattcagattgcagacgaaagaaaaaaaggcgctccgtggagcgccgaataacagtcacaagttgggataacgtaagttgagggtgcagcggcataacattggcagaacaacatctttaacctttcacaccacctgccgtcaggccgttgaccagccagcgttgagccagcaagaagacgatggtgatcggtaatgcagacatcacggcagcggcggcaaagtcaccccacaggtagttttgcggattgaggtattgctgcatccccacggccagggtgtagctgtttacgtcacgcagtaacagcgacgcgaccggaacttcagtaatggcagcgataaacgacaggatgaataccaccgccagaatcggtactgacagcggcaacaggacaaggcggaaggcctgccacggtgtcgcaccatccagcgcagccgcttcttccagcgaactgtcgatggtttcgaaatagcctttgatggtccagacgtgcagcgcaatcccacccagatacgcgaaaattacgccgccgtgagtattcaggccaatgaatggaatgtactcacccagacgatcaaacaacgcatacaacgcgaccagtgaaagtactgccgggaacatctggaaaatcagcattcctttcagcagcgtcgctttgcctggaaagcgcatacgggcgaaagcgtaggcgcaggtggtggagagcgccacaatgccaatcgcggaaatcccggcgacctttaccgagttccacagccacagcagcaccgggaatggcggtggcgtaatgcgaccatcagcctgttccacgctaaaacctaatgccagtttccagtgatcccaggagatttgctccgggatcaggctgccggtcgcaaagttcccctggcgcagtgagatagcgacgaccatcagcagcgggaacataatcgccgcgataaaaagtagcagtagcaggtgagtaataaacaaacgtgctttttgcgatttcggttggaccattgccatttttgttatctcccttaatcaaacttcattcgcgtggctttcaggttcactatcgccagcgcacccaccagcaggaagatcagcgtggcaattgctgctgccagaccgaagtcctgacccccgccgccttcaaaagcgatgcggtaggtgtagttaacaagcaggtcggtataaccggctggcgtggtcgtgccaagacgatccgggccgccgttggttaacagttgaatcagcacgaagttgttaaagttaaaggcgaagctggcgatcatcagcggcgtcagcggtttaatcagcagcggcagcgtaatcttaaagaagttctggaacggacctgcgccatccattgctgaggcttcatacaaatcgtccggaatcgctttcagcaagcccatgcagaggatcatcatgtacggatagcccagccaggtattgacgataatcagcatcgttcgggcggtggtcggatcgctgaaccaggcgggcttcacgccaaacagcgcgctcaacatcatgttgatctcaccgaagctctggttaaacaaccctttgaaaatcaagattgaaatgaacgatggcaccgcgtagggcagaatcagcaggacgcgatagaccgctttgccncgcaacgcttcccactgcaccagacacgccagaaccatgccgactgccaccgttaaaaagacagtgatcagcgagaacaccacggtccagacgaaaatggcgaggaacggtttctgaatgccttcgtcggtgaagacgcgagtaaagtttttccagccggtggtcacggtgtaaccggggcttagcttttcatcaccccagttgccgtcggcggtaatggactggtaaaagccaatttggttattcggacgatatttcacgccgctctgattattcgtcaacgtgccgtcaccgtcgagtgtgtagagcggctgcgtgccagaaaactggcgcagggagctcatcatcactttgttgccatccggcagaatggcggtaatgtcactcagcgcctgacgattctgggtaatcacgcgtagatttgcgcgttcgccttcgggctgggcggtcgtttctttcagttgcagtttttgctctccgccaaatttaaaagcgtcggagaggtaatttttgccggtttcgccgtcgctgagcgccagttgccactcatcgcccgccgggtaaagaccanagttataggttttgcctgcttgccaggagcgatctaacaacacttcctgtgcacgttcaaaagtcagctggttagtgctgctgtagttggtgaaggcaatggcgatggtgcagaccagagggaagaggacgaataatcccattccagccattcccgggtaaacatagcgccaggcgtaggctttacgattggcgaaaatatacagccccgctgaactcaatatcagcgtggtaatggcgaacaggtattccccttgtgcgtacattaaaacaacaaggtaacccaccagcaggccgagcagacctaacactgaccatttcagcgcgtcgctttgccaccaatgtttctttttaatgacatccatggggttcttcctcattccaggacggataaggctttcatgccttatccgacaacaactgcctgatgcgacgctgacgcgtcttatcaggcctacatacgtttcggttttgtaggccggacaaggcgttcacgccgcatccggcatttcacagcattacttggtgatacgagtctgcgcgtctttcagggcttcatcgacagtctgacgaccgctggcggcgttgatcaccgcagtacgcacggcataccagaaagcggacatctgcgggatgttcggcatgatttcacctttctgggcgttttccatggtggctgcaatacgtggatctttcgccaactcttcctcgtaagacttcagcgctacggcacccagcggtttgtctttattaaccgcttccagaccttcgtcagtcagcagatagttttcgaggaactctttcgccagctctttgttcggactggcggcgttaataccggcgctcagcacgccaacgaacggtttagatggttgacccttgaaggtcggcagtaccgttacaccataattcactttgctggtgtcgatgttggaccatgcccacgggccgttgatagtcatcgctgtttcgcctntattaaaggcagcttctgcgatggagtaatcggtgtctgcattcatgtgtttgtttttaatcaggtcaaccaggaaggtcagacccgctttcgcgccagcgttatccacgcccacgtctttaatgtcgtacttgccgttttcatacttgaacgcataacccccgtcagcagcaatcagcggccaggtgaagtacggttcttgcaggttgaacatcagcgcgctcttacctttcgctttcagttctttatccagcgccgggatctcttcccaggtttttggcgggttcggtagcagatctttgttataaatcagcgataacgcttcaacagcgatcgggtaagcaatcagcttgccgttgtaacgtacggcatcccaggtaaacggatacagcttgtcctggaacgctttgtccggggtgatttcagccaacaggccagattgagcgtagccaccaaagcggtcgtgcgcccagaagataatgtcagggccatcgccagttgccgcaacctgagggaatttctcttccagtttatccggatgctcaacggtgactttaattccggtatctttctcgaatttcttaccgacttcagcgagaccgttatagcctttatcgccgttaatccagattaccagtttaccttcttcgattttggcgagagccgaggcggaaaacatcatcgtcgttaatgcggataatgcgaggatgcgtgcacctgtttttattttcataatctatggtccttgttggtgaagtgctcgtgaaaacacctaaacggactctagtttctttatacggcaacctctttccatcctccttgcccctacgccccaccgttgctttgtgtgatctctgttacagaattggcagtaatgtggagatgcgcacataaaatcgccacgatttttgcaagcaacatcacgaaattccttacatgacctcggtttagttcacagaagccgcgttctcatcctcccgcctcctcccccataaaaaagccagggggtggaggatttaagccatctcctgatgacgcatagtcagcccatcatgaatgttgctgtcgatgacaggttgttacaaagggagaagggcatggcgagcgtacagctgcaaaatgtaacgaaagcctggggcgaggtcgtggtatcgaaagatatcaatctcgatatccatgaaggtgaattcgtggtgtttgtcggaccgtctggctgcggtaaatcgactttactgcgcatgattgccgggcttgagacgatcaccagcggcgacctgttcatcggtgagaaacggatgaatgacactccgccagcagaacgtggcgttggtatggtgtttcagtcctacgcgctctatccccacctgtcagtagcagaaaacatgtcatttggcctgaaactggcaggcgcaaaaaaagaggtgattaaccaacgcgtcaaccaggtggcggaagtgctacaactggcgcatttgctggatcgcaaaccgaaagcgctctccggtggtcagcgtcagcgtgtggcgattggccgtacgctggtggccgagccaagcgtatttttgctcgatgaaccgctctccaacctcgatgctgcactgcgtgtgcaaatgcgtatcgaaatctcccgtctgcataaacgcctgggccgcacaatgatttacgtcacccacgatcaggtcgaagcgatgacgctggccgacaaaatcgtggtgctggacgccggtcgcgtggcgcaggttgggaaaccgctggagctgtaccactatccggcagaccgttttgtcgccggatttatcggttcgccaaagatgaacttcctgccggtaaaagtgaccgccaccgcaatcgatcaagtgcaggtggagctgccgatgccaaatcgtcagcaagtctggctgccagttgaaagccgtgatgtccaggttggagccaatatgtcgctgggtattcgcccggaacatctactgccgagtgatatcgctgacgtcatccttgagggtgaagttcaggtcgtcgagcaactcggcaacgaaacccaaatccatatccagatcccttccattcgtcaaaacctggtgtaccgccagaacgacgtggtgttggtagaagaaggtgccacattcgctatcggcctgccgccagagcgttgccatctgttccgtgaggatggcactgcatgtcgtcgactgcataaggagccgggcgtttaagcaccccacaaaacacacaaagcctgtcacaggtgatgtgaaaaaagaaaagcaatgactcaggagatagaatgatgattactctgcgcaaacttcctctggcggttgccgtcgcagcgggcgtaatgtctgctcaggcaatggctgttgatttccacggctatgcacgttccggtattggctggacaggtagcggcggtgaacaacagtgtttccagactaccggtgctcaaagtaaataccgtcttggcaacgaatgtgaaacttatgctgaattaaaattgggtcaggaagtgtggaaagagggcgataagagcttctatttcgacactaacgtggcctattccgtcgcgcaacagaatgactgggaagctaccgacccggccttccgtgaagcaaacgtgcagggtaaaaacctgatcgaatggctgccaggctccaccatctgggcaggtaagcgcttctaccaacgtcatgacgttcatatgatcgacttctactactgggatatttctggtcctggtgccggtctggaaaacatcgatgttggcttcggtaaactctctctggcagcaacccgctcctctgaagcaggtggttcttcctctttcgccagcaacaatatttatgactataccaacgaaaccgcgaacgacgttttcgatgtgcgtttagcgcagatggaagtcaacccgggcggcacattagaactgggtgtcgactacggtcgtgccaacctgcgtgataactatcgtctggttgatggcgcatcgaaagacggctggttattcactgctgaacatactcagagtgtcctgaagggctttaacaagtttgttgttcagtacgctactgactcgatgacctcgcagggtaaaggtctgtcgcagggttctggcgttgcatttgataacgaaaaatttgcctacaatatcaacaacaacggtcacatgctgcgtatcctcgaccacggtgcgatctccatgggcgacaactgggacatgatgtacgtgggtatgtaccaggatatcaactgggataacgacaacggcaccaagtggtggaccgtcggtattcgcccgatgtacaagtggacgccaatcatgagcaccgtgatggaaatcggctacgacaacgtcgaatcccagcgcaccggcgacaagaacaatcagtacaaaattaccctcgcacaacaatggcaggctggcgacagcatctggtcacgcccggctattcgtgtcttcgcaacctacgccaagtgggatgagaaatggggttacgactacaacggcgatagcaaggttaacccgaactacggcaaagccgttcctgctgatttcaacggcggcagcttcggtcgtggcgacagcgacgagtggaccttcggtgcccagatggaaatctggtggtaatagcaaaacctgggccggataaggcgtttacgccgcatccggcataaaacaggttgtcattatctgaaaggggcgaaagcccctctgattatcgggtttagcnnnntattgcctggctaccgctgagctccagattttgaggtgaaaacaatgaaaatgaataaaagtctcatcgccctctgtttatcagcagggttactggcaagcgcgcctggaatcagccttgccgatgttaactacgtaccgcaaaacaccagcgacgcgccagccattccatctgccgcgctgcaacaactcacctggacaccggtcgatcaatctaaaacccagaccacccaactggcgaccggcggccaacaactgaacgttcccggcatcagtggtccggttgctgcgtacagcgtcccggcaaacattggcgaactgaccctgacgctgaccagcgaagtgaacaaacaaaccagcgtttttgcgccgaacgtgctgattcttgatcagaacatgaccccatcagccttcttccccagcagttatttcacctaccaggaaccaggcgtgatgagtgcagatcggctggaaggcgttatgcgcctgacaccggcgttggggcagcaaaaactttatgttctggtctttaccacggaaaaagatctccagcagacgacccaactgntcgacccggctaaagcctatgccaaaggcgttggtaactcgatcccggatattcccgatccggttgctcgtcataccaccgatggcttactgaaactgaaagtgaaaacgaactccagctccagcgtgttggtcgggcctttatttggttcttccgctccagctccggttacggtaggcaacacggcggcaccagctgtggctgcncccgctccggtgccggtgaagaaaagcgagccgatgctcaacgacacggaaagttattttaataccgcgatcaaaaacgctgtcgcgaaaggtgatgttgataaggcgttaaaactgcttgatgaagctgaacgcctgggatcgacatctgcccgttccacctttatcagcagtgtaaaaggcaaggggtaattacgccccacagtgctgattttgcaacaactggtgcgtctcctggcgcacctttttttatgcttcattccagggatatgagcgattttttatagtaactcacttcttcttcactaagaatatccattatctcaa

SEQ ID NO: 1658 - DNA, 236 bp, Escherichia coli
  Strain O55:H7
tatcagagattcttttcctttcgccggtagtgtctggacgctcaggctactttttccagttatttcatttctgtaatgcagaggttttatgttaggtcatatctcaaagtttgacggcaataactctttgataaaacatggtgtggtgcaaggaaataatatagtagattttgatttactacgtaattttaatggggggccagggttaaatcgagaaaactttatttatatcagca

SEQ ID NO: 1659 - DNA, 1054 bp, Escherichia coli
  Strain O55:H7
atataaaacaacggaacgaaaaaaatcattcaataaatatgtttcgtgaagtctcaatcagtggtgatattgtaagcgtaaaattttatagaaatgaaaaaatagaatgcgcttgtgattttatgatggctaaagatgcgcaggggtatatcgacctgtctgaattggatttaacaagttgtcattttaaaggtgacgttatttcgaaggtgtctttcatatcatcaaatctacaacatgtaacattcgaatgtaaagaaattggggattgcaattttactactgcaatagttgataatgtcatatttaaatgtcgacgtttacacaatgtaatttttatcaaagcgagtggtgattatgtcgattttagcaaaaatattcttgatacagttgacttctcgcagagtcaacttactcatagtaatttttgtgaatgtcagattagaaattcaaacttcgatcattgttatctttatgcttcgcacttcaccagagcagaatttcttactgacaaagaaatatcatttattaaatcgaatttaacagctgttatgtttgatcatgtgcgaatatcgacagggaattttaaaggcagcgttacacaactaatggtattatctattgattactcagatatatttggaaatgaatatctcgatggttatatcaataacattataaaaatgattgattcgttgccagatgatccagcgatattgaaatccgttctggcagtaaaactggtgatgcaattaaaaattcttaatattgttaataaaaactttattgagaatatgaagaaaatatttagccatggtccttatataaaagatcccattatacgtagttatatccatcctgatgaagataacaagttcgataattttatgcgtcaaaatcgattcagtaaggtgaatttcgatacccaacagatgatcgattttattaacagatttaatatgaataaatggctgattgatcgaaataacaatttttttatccaacttatcgatcaggctctacgatcaacgaatgatacgatcaaagaaaatgc

SEQ ID NO: 1660 - DNA, 16576 bp, Escherichia coli
  Strain O55:H7
  modified_base (1412)..(1412): a, c, g or t
  modified_base (1624)..(1624): a, c, g or t
  modified_base (3318)..(3318): a, c, g or t
  modified_base (3335)..(3335): a, c, g or t
  modified_base (6031)..(6031): a, c, g or t
  modified_base (7636)..(7636): a, c, g or t
  modified_base (8031)..(8031): a, c, g or t
  modified_base (9304)..(9304): a, c, g or t
  modified_base (9316)..(9319): a, c, g or t
  modified_base (9323)..(9324): a, c, g or t
  modified_base (10640)..(10640): a, c, g or t
  modified_base (11216)..(11216): a, c, g or t
  modified_base (11330)..(11330): a, c, g or t
  modified_base (11746)..(11749): a, c, g or t
  modified_base (12858)..(12858): a, c, g or t
  modified_base (13246)..(13246): a, c, g or t
  modified_base (16310)..(16310): a, c, g or t
ctttataaagagtggattcgtagtgatgatgtttcacctttatttatagaaattgaagataatttaagaacctttaacacgaatgaattaacacgaaacgataatatctttatcttgttctcctctgtcgatgatgggccagttatggtggtaagctcccagcgcttacatgatatgttgaatcctacaaaagataccaattggaattccacgtatatctataaatccagacatgagatgttgcctgttaatcttactccggaaacacttttcggctccaaatcttatgataaacatgcgcttttccccatttttactgcgagttggcgagctaatcgtataaagaataaaggtatttaagtaaaggaaaacatcaccgctcttggcatcatgggcggtgatgcccctatggttgccctcgccagcacgggcatcggcaaagcgtaaggttcaacagcgttttaccacttcatgcgattgttgcgtttttgttgcgcattagatcacttaatttgctttacatctcccgtaaacacttttctgcgatacaatgcctttacgttatgtaacggagagttcggcatgtcacaccccgcgttaacgcaactgcgtgcgctgcgctattgtaaagagatccctgccttggagccgcaactgctcgactggctgttgctggaagattccatgacaaaacgttttgaacagcagggaaaaacggtgagcgtgacgatgatccgcgaagggtttgtcgagcagaatgaaatccccgaagaactgccgctgctgccgaaagagtctcgttactggttacgtgaaattttgttatgtgccgatggtgaaccgtggcttgccggtcgtaccgtcgttcctgtgtcaacgttaagcgggccggagctggcgttacaaaaattgggtaaaacgccgttaggacgctatctgttcacatcatcgacattaacccgggactttattgagataggccgtgatgccggactgtgggggcgacgttcccgcttgcgattaagcggtaaaccgctgttgctaacagaactgtttttaccggcgtcaccgttgtactaagaggaaaaaaatatggagtggagtctgacgcagaataagctgctggcgtttcatcgcttaatgcgtacggataagccaattggcgcgttactgctgctctggccaacattatgggcgttgtgggtggcgacaccgggcgttccccagctctggatcctggcggtgtttgtcgcgggtgtctggctgatgcgcgctgccggatgtgtggtgaatgattatgctgaccgcaagtttgatggtcatgttaagcgcacggcgaaccgaccacttcccagcggcgcggtaacagagaaagaggcgcgcgcgctgtttgtagtgctggtactgatttngtttttactggtgctgacgctgaatacgatgaccattctgttgtcgattgccgcgctagcgctggcgtgggtgtacccgtttatgaagcggtatacccatctaccgcaagtggtgctgggcgcggcgtttggctggtcgattccaatggcttttgctgctgtgagtgagtcggtgccattgagttgctggttaatgttcctcgccaatattntctgggcggtggcttacgacacgcagtatgcgatggttgaccgtgatgatgatgtgaagattggcattaaatccaccgcaatcctgttcggccaatacgataaattgattattggtattttgcagattggcgtactggcgctgatggcgattatcggtgagttaaatggcttaggctggggatattactggtcaattctggtggctggcgcgctgtttgtttatcaacaaaaactgattgccaaccgcgagcgcgaagcctgctttaaagcatttatgaataataactatgttggtctggtactgtttttagggctggcaatgagttactggcatttctgatgatgtaaaaaagccggatgatcatccggctttcttctgggttgcctgatgcgctgcgcttctcaggcctacacaacagatcgcaatttattgaatttgcagattatggaaggccggataaggcgtttgcgccgcatccggcaattctctctgattacccttcgccctgcgtcgcactctcaatcgtcaaacgcacgtctgatgtaatcaactccgccagcaactgataaaccttcatcgtttctgccggttcggcatcgccgctatcgctgatatacccttcatcacgcagcgtaagcaccagagaactgaacaccgccttgtcgaagaactccggcgcgttgatgccgtgcagcacggagagacgttgcgcgacggtgcggctctctttctccagcgtaccgcggttgatcgacgggttggcgctcaacagccagaaggtgatggcataacgttgcagcgtttcgcgcgcgcctgcggcgagcagctgtagcgtgcgagaatgcaccgggttgatatgcaactcatcatcttgcagggtaatcagcccctgacgttgcatctcatttgccagcgcatcaataacgtccggcaactcgtcgcgatcccagcgcaggaacagctccgctttcagcattgggtaaagcacattgacgtgctccatcaatacgtcgcgggagatgtggcgatgctgggtgacaattgccgccatcagcgaaggtagcaccaacatatgcgcaatgttgttgcgatagtaggtcatcagcaccgcttgctcgcgcggcagaatgatgatgtcgccgatagtgtctttctcaacttcaaacttgttcatttgcagcgcgtgatcgataagctcgctggcgctggctgaaggaacggtagagtccgtggagtaaggcacgttgcgcatcagatccaggtagcagttgagttgctcggttaactgctcgcgggtgagtgagcgctgacgtgatgccagtagcgcagtacagcacaggttcatggcgtttgccgcgcctgcgttgttaatgcgtaccatcagatcggcagcaatattattgaccgtcggcgttaaccatgccggacgcactgcttcgatgggatcgatagattcacgccagtctggtacgtgctggttaaggtaggtcatcaacggcattggttcaccgaaattgacgtaaccctggccgagattacgcagcttgcttaaaccgcgcagcatctgcggcaggctctctttctctttcgtcgcgccgcgcagttctttggcgtaagtacccacttccatgacgtgctcataaccgatatagatcggaatcagcgtaatcggacgcgtgccgccacgcagcntcgcctgaatggtcatngacagcgtaccggttttcggatccagcaaacgccccgtacgggaacgaccgccttctacgaagtactcgacggaataaccacggctgaacagttcgccgagatactcacggaaaacggtggaatagagcttattgcctttaaaagtacggcgaataaagaacgcacccagacggcggaaaatcggcccggcaggccagaaattcaggttgatcccggcggcgatatgcggcggcactagcccctggtggtacagcacgtaagaaagcagcaggtagtccatgtgactgcggtggcaaggcacatataccagctcatgaccgtcgtgggccagctggcgaacgcgctcggcgttatggacgttgatgccctggtaaaggcggttccaggtaaagcccagaatacggtcagtcaggcggatcatctcgtaagagaaattcgccgcaatctcttccatcagcgcaatcgcgttctgctgcgctttttcatgggagatttttttgctgcgcgcttcatcttctaccgctttggcaatggcgcgggaggcgagcagcttattaaacagatcctgacgagcaggcagacgtggtcctacggcagccagacgttgacgggcaaagtgcatacgcgccacgcgcgccagtttctgcgcgatagttttatccgtgccgtgttcatccgccatacggcgcagcgaaactgacggcgagaaacgcacaaaactgtcgcgaccgagccacagtacagcgaaaaatttctgtacgccgttaagcatacgcagcggcgggttcacttcgcctttttcacgccccggcgcgcgaccaaacatcaccgacactggcaccatctgcacatccagatttgggttgctacggtgcaaatcgagatagtcgtggaacagcttaatagactcttctttcggcgtgtaataggtgaatacacgcggcccgccgtgaatgaacacatagcgcggcagtagcgtgccgtcgatttccagcggctctaacgggtcaggcaagtcatgtgccagacactgggcgcgcaacgtcagcaaatctgctttcgagttgtacggtaaaacgtacataattggacgagaggtatccagccccagttccggggcaggatctgccggaatagacttgctttttaccaggatgcttaatggtaaattcagtaatttgtagtaaattcgtggccagccggacataaacgatgtaaagcctctggttaataatgcaaatgcgcggcaaggatagcagaaagtcatgggaaattctgtggtatccgctcatgtttcgcgcggcgttacgcaaacccgaatcatcggatttaacggtacactgatattgacgctcataatgtaaaaaggttctttcaatggccaataataccactggattcacccgaataatcaaagctgctggctattcctggaaaggtttacgcgctgcatggatcaacgaagcggcattccgtcaggaaggcgtagcggtattgttggcggtggtcatcgcctgctggctggatgtggacgcgattacccgcgtgctgcttatcagctccgtgatgctggtgatgattgtggaaatcctcaatagcgccatcgaagcagtggttgaccgaattggctctgaataccatgagctttccggacgcgctaaagatatgggatccgccgcggtgctgattgcgattatcgtcgccgtgattacctggtgcatcctgttatggtcgcattttggataacccttccagaattcgataaatctctggtttattgtgcagtttatggttccaaaatcgccttttgctgtatatactcacagcataactgtatatacacccagggggcggaatgaaagcgttaacggccaggcaacaagaggtgtttgatctcatccgtgatcacatcagccagacaggtatgccgccgacgcgtgcggaaatcgcgcagcgtttggggttccgttccccaaacgcggctgaagaacatctgaaggcgctggcacgcaaaggcgtaattgaaattgtttccggcgcatcacgcgggattcgtctgttgcaggaagaggaagaagggttgccactggtaggtcgtgtggctgccggtgaaccgcttctggcgcaacagcatattgaaggtcattatcaggtcgatccttccttgttcaagccgaatgctgatttcctgctgcgcgtcagcgggatgtcgatgaaagatatcggcattatggatggcgacttgctggcagtgcataaaactcaggatgtacgtaacggtcaggtcgttgtcgcacgtattgatgacgaagttaccgttaagcgcctgaaaaaacagggcaataaagtcgaactgttgccagaaaatagcgagtttaaaccaattgtcgttgaccttcgtcagcagagcttcaccattgaagggctggcggttggcgttattcgcaacggcgactggctgtaacatatctctgagaccgcgatgccgcttggcgtcgcggtttgtttttcatctctcttcatcaggcttgtctgcatggcattcctcacttcatctgataaagcactttggcatctcgccttacccatgattttctccaatatcactgttccgttgctgggactggtcgatacggcggttattggtcatcttgatagtccggtttatttgggcggcgtggcggttggtgcaacngcgaccagctttctctttatgctgttgctgtttttacgcatgagcaccaccgggctgactgcgcaggcttatggtgccaaaaatcctcaggcattagcccgtgcgctggtgcaacctttgctgttggcgttgggggctggggcgttaattgcgctgctgcgtacgccgattatcgatctggcgctgcatattgttggcggtagtgaagcagtcctggaacaggcgcggcgctttcttgaaatccgctggttaagcgcaccggcgtcgctggcgaatctggtattacttggttggttactcggcgtgcaatatgcccgtgcgccagtaattttgttagtggtcggcaatatcctcaacattgtgctggatgtctggctggtgatgggactgcatatgaacgtgcggggcgcggcgctggcgacggttattgcggaatatgcaacattgctgattggtctgctaatggtgcgtaaaatcctcaaactacgcggaatctccggcgaaatgctgaaaactgcctggcgaggaaacttccgtcgcttgctggcacttaaccgcgatatcatgctgcgctcgctgttgttgcaactctgtttcggcgcgatcaccgtacttggcgcgcgactggggagtgacattatcgctgttaacgcggttctgatgacgctactcacctttaccgcctatgcgctggacggttttgcctacgcggttgaagcacattccggtcaggcatacggtgcgcgcgacggtagccagttgctggatgtctggcgggcagcatgccgccagtcggggatcgtagcgttactgttttcggtggtttatttgctggcaggggaacacatcattgcgttactgacgtcgttaacccagattcagcagctggccgaccgctatcttatctggcaggtgattttgccgttggtcggcgtctggtgttatctgctggacggcatgtttataggcgcaacgcgtgctgctgaaatgcgtaacagtatggcggtggccgccgcaggttttgcgctgacgctccttacgctgccgtggttgggtaatcatggtttgtggttggcgttaaccgtctttctggcgttgcgcgggctttctctggcagctatctggcggcgtcactggcgcaacggtacctggtttgccgcaacgtgacggttaaaaattctgaataaataatcctaagccaaattgctgactacacttaatctcacgttcagaagaaaagtgaacgtactctcattcacaacctaacgatgaggtcttgattatgaataaagatgaagccggcggtaactggaaacagtttaaaggtaaagtgaaagagcaatggggcaaactgaccgatgatgatatgacgatcattgaaggtaaacgtgatcaactggtcggtaaaatccaggaacgttatggttatcagaaagatcaggcagaaaaagaggtcgtggattgggaaacccgcaatgaatatcgctggtaattaatccctcctgcccgacgtgtacaaggatgtacgccctcttaacgcggtttctttttcacctgcacagagtgatcatgctggcactgttcaggatgacgacacgcttccanttccatgcatgccgcacagagcccatgtgcttcaatcacattatgccgcagggcaaaccccatttttgccgccagcgtatgcatgatgtcttccacgccttctgcacattcttctttcaccgcgccgcagcgatcgcaaataaacatagctgacgtatgggtgggctggtcgaacagatggcagagcacataactgttggtggattccaccttatgcacaaaaccttgctcaagcagaaaatccagcgcgcgataaaccgttggcggcttggcttgcggttcagcttcgcgcagcaaatcaagcagatcataagcgctgatagcgccatcctgcagactcatcaggcgcaacacttccaggcgctgtggggtcaggcgcacattacgctgcgcgnagattttgtcagcctgcgctaataactcctgcgttgtggtcttttccatcgggcacctcaaagtgggggttaagaatgtccttactttaccatgttccaggaaaaacaccgagaacccttattgttgccgtaatgttgcttttctgttttgtaggtaagatgttgtgttgcctggcagtaccattatcaacacgataataattaataattcatttttaaataaattgcttcaagttaactcgctatttatttaaccgtggctaatcgtatacccgaatttcagaaaattatgagcgatttttgatagttaccggttccaaaaacacttataaggaggacacggtacgacaaaaaaggtagatgaatcatgttaaagataatacccggtgcaacaggatactttaataaaacactcaattcaaatcaattcgataatgaagatgcaatcaaaggtaaagtaaatagtatatatggtaaatctattgattattcaacgatgcgtcatcgggatataattattgcaaaaatagatttatttattcaaagaatcactcataatttatggactgcacgtgaaaaaaatgtgacgttaattaagcaaataaacgatctcaaaatgtgtgtcaatgagtatattggagattgtactgatgaggaattaaacggtcgtgaatttattgcatcagttgttgacagggctatttttcatttcgcgattaatagtatatgtaatcccgaggataataaagatgcgacactcatagaacgatgtacttttgatgtagaaaccaagaatggtcttccctccacggttcagctattttatgaggaatctaaagataatgaacctttagcgaatatacatttgcaagcaataggttctggtttcttaacgtttgttaatgccagccaggaacatgatgacaacagcttaaaattatttgcttcgctgttaatttccctttcatattctagtgtctactcagattttgcaggaagagtgaatattaatgaatataatgataactacctgaaagctcagtttgaagaattatctcaacgtgatatgaagaagtacctgggagagatgaagcgtctggcagatgggggagaaatgaattttgatggctatctggataagatgtcacatctggtgaatgaaggaacgctcgcccctgatattttaagcaaaatgcgagatgctgcaccgaaattaattgactttgctaagtcgtttgacccaaactcaaaggaaaagattaaaatatatacnggcacttctaannnnattnntgatttattcggggttaaatcggagaaataatatgtgaagttcttcgatggtatgaaaggtattacataaaagaacccaatgcttattgggttctttttttctctatcagtgctattagcagggagagatatcaccggagtttaatgtgtgatttttatttatcgtcgaatctgtattgtttatcattgcttttcacaacgctaacatctaataagattagatattcacttcgtgagagcttcatgccttgagaggatctcaattttcttttgcaatgagacaggcgcttcctgttgttatggtatagtaccccgttattgagcctcctgaacagtgatgctgaataacataaccacatgatatatcgataaaataatctctacatttgaaaatgcacggtaattctgaaatgcaaaaaatcaaccaaaccagcgcaatgcctgaaaaaactgacgttcactggagtggtcggtttagcgttgcaccaatgctcgactggacggacagacattgccgctatttcttgcgtctgctttcccgcaatacgttgctgtataccgaaatggtgactacaggggcgattattcacggtaaaggtgattacctggcgtacagtgaagaagaacatccggtagcgttgcaactcggcggtagcgatccggcggcgctggcgcagtgtgcgaagctggcagaagcgcgtggatatgatgagatcaacctgaatgtcggctgcccgtctgaccgggtgcagaacggcatgtttggtgcgtgtctgatgggtaatgcgcagctggttgccgactgcgtgaaagcgatgcgcgatgtggtgtcgattccggtgacggtgaaaacgcgtattggcatcgatgaccaggacagctatgaatttctctgcgatttcatcaacaccgtttccggcaaaggcgagtgtgagatgttcatcatccacgcacgtaaagcctggctttcggggttaagcccgaaagaaaaccgtgaaatcccgccgctcgattatccgcgtgtgtatcaactgaagcgtgactttccgcatctgacgatgtcgattaacggtggtatcaagtcgctggaagaggctaaagcgcatttgcaacatatggatggcgtgatggtcgggcgcgaagcgtatcagaatccgggtattctggcggcggtagaccgagagatctttggttcctcggataccgatgccgatccggtggcggtagtgcgcgccatgtatccgtacattgagcgtgaactcagccaggggacgtatcttggccatattacccggcatatgttgggcttgttccanggtattcctggcgcgcggcagtggcggcgttatttaagtgaaaatgcccataaagcgggtgcagacattaacgtgctggaacacgcgctcaaactggtggcggataagcgttaacttttcaccaaaaagtagtcaaattcaccacgccctgcgcaccgtcgcggggcgttttgctgttaaatcaatagattatttttggcatgattcttgtaatgcctgcaagagatttcatatttgggagagcatcatgctggaactactttttgtgattggcttttttgtcatgttgatggtcaccggcgtttcgttgctgggcattatcgccgcgctggttgtggcgacggccattatgttcctcggcggtatgctggcattgatgattaagttgctgccgtggttactcctggcgattgcggtggtgtgggttattaaggcgattaaagcaccaaaagtgccgaaatatcagcgttatgaccgctggcgttactaagggattgtgcggatgatcacaacctaaggttttatccttagaacaaaataggaattgataatcaaatctgtcactattgcgcctcnaacagattcatcgtgctgtaccctacatacagccgaactataaaaagaaagggcttcccaggtggaagccctatttattttatggaatcaacaggctggaaccttgcgtcgcgnggctttccagaatctcatgcgcacgctgcgcatccttcagcggatatttctgctgctcggcgacatcgaccttaatcacaccgctggcaatcaaagagaacagttcattactggcctcggttaattcctcccgcgtggtgatatagccttgcagggaagggcgtgtcacatacaacgagcctttctgattgagaatgcctaagttcacaccggtaaccgcacctgatgagttgccaaaactcaccattaagccgcggcgttgcaggcaatccagcgaccgttcccaggtgtctctgcccacggaatcgtacactacgcgcacttttttaccaccggtgatctcttttaaccgctcgaccagattctcttcacgatagttaataacctgccatgcgcccgcttttagcgcgctctgnnnnttttgcgcggttcctacggtgccgataagtttcgcgcccagggcttttgcccactggcaggcaatcaagccaacgccgccagctgctgcgtggaacaggaactgttcatcgggtttaatttcataggttttgcgcagcagataataaaccgttaagcctttcaggaaagatgctgcagcttgctcaaaagaaattgccgcaggcagaatcgccgctttatccgcattaatgttatgcacagagctgtaagcgcctaacgccgactgcgcatagactacacgatcgcctgccttaatatgctttacaccactgccgactttactcacgatgcctgccgcttcggtacctaatccgctgggtagtgatggcggcgggtaaaggccgctgcggatatacgtgtcgataaaattgatgccgatggctttattttcgacctggatttcattctccgccggatcggcaggagtgaactctacggcttgaagtacttccgggccaccgtgcttgtgaaattcaattcgtgttgccatgtgtcctccagaacgtatcgtcagggtctgcttcatatggtaaagtttcgacccattctttatctcggtaactccattcactatggcaggaaataaacccttcaacaaacagcaggctgaaccccgcgaacgcgatccacaagttgccgggctgaaagtgcctccgcactcgatcgaagcggagcagtcggtgttgggcggtttaatgctggataacgaacgctgggatgatgtagccgagcgtgtggtagcagacgatttttacacccgcccacaccgtcatatctttactgaaatggcgcgtttgcaggaaagcggtagtcctatcgatctgattacccttgcggaatcgctggaacgccaggggcaactcgatagcgtcggtggttttgcttatctggcagagttgtcaaaaaatacgccaagtgctgcgaacatcagttcctatgcggacatcgtgcgtgaacgtgccgttgtccgtgagatgatctcggttgcgaatgagattgccgaagctggttttgatccgcaggggcgtaccagcgaagatctgctggatctggctgaatcccgcgtctntaaaattgccgaaagtcgtgcgaacaaagacgaagggccgaagaacatcgccgatgtgctcgacgcaaccgtggcgcgtattgagcagttatttcagcagccacacgatggcgttaccggggtaaacaccggttatgatgatctcaacaaaaaaaccgctggcttgcagccgtcggatttgatcatcgtcgccgcgcgtccgtcgatgggtaaaacaacatttgcgatgaacctcgtcgaaaacgcggcgatgttgcaggataaaccggtacttattttctcgctggagatgccatcagaacagatcatgatgcgttctctggcgtcgctgtcgcgcgttgaccagactaaaatccgtaccgggcagctcgatgatgaagactgggcncgcatttccggcaccatgggtattttgctcgaaaaacgcaatatctatatcgatgactcctccggcctgacgccaacggaagtgcgttcccgcgcacgccgtattgcccgtgaacacggcggcatcgggcttatcatgatcgactacctgcaactgatgcgcgtaccggcactttccgataaccgtacgctggaaattgcagaaatctcccgctcgctgaaagcactggcgaaagaactgaacgtgccggtggtggcgctgtcccagttgaaccgttctctggaacaacgtgccgacaaacgtccggtcaactccgacctgcgtgaatctggctctatcgagcaggatgcggacttgatcatgtttatctatcgtgatgaggtgtatcacgaaaacagtgatttaaaaggcatcgcggaaattattatcggtaaacaacgtaacggcccaatcgggacggtacgcctgacctttaacggtcaatggtcgcgcttcgacaactatgcggggccgcagtacgacgacgaataataattattttatgaattaggtaattaaagcaaacacttatcaaggaacacaaatgcaagcggcaactgttgtgattaaccgccgcgctctgcgacacaacctgcaacgtcttcgtgaactggcacctgccagtaaaatggttgcggtggtgaaagcgaacgcttatggtcacggtcttcttgagaccgcgcgaacgctccccgatgctgacgcctttggcgtagcccgtctcgaagaagctctgcgactgcgtgcggggggaatcaccaaacctgtactgttactcgaaggcttttttgatgccagagatctgccgacgatttctgcgcaacattttcataccgccgtgcataacgaagaacagctggctgcgctggaagaggctagcctggacgagccggttaccgtctggatgaaactcgataccggtatgcaccgtctgggcgtaaggccggaacaggctgaggcgttttatcatcgcctgacccagtgcaaaaacgttcggcagccggtgaatatcgtcagccattttgcgcgcgcggatgaaccaaaatgtggcgcaaccgagaaacaactcgctatctttaataccttttgcgaaggcaaaccaggtcaacgttccattgccgcgtcgggtggcattctgctgtggccacagtcgcattttgactgggtgcgcccgggcatcattctttatggcgtctcgccgctggaagatcgctccaccggtgccgattttggctgtcagccagtgatgtcactaacctccagcctgattgccgtgcgtgagcataaagtcggagagcctgtcggttatggtggaacctggataagcgaacgtgatactcgtcttggtgtagttgcgatgggctatggcgatggttatccgcgcgccgcgccgtccggtacgccagtgctggtgaacggtcgcgaagtgccgattgtcgggcgcgtggcgatggatatgatctgcgtagacttaggtccacaggcacaggataaagccggggacccggtcattttgtggggtgaaggtttgcccgtagaacgtatcgctgaaatgacgaaagtaagcgcttacgaacttattacgcgcctgacttcaagggtcgcgatgaaatacgtggattaatcgttctgtaatatttgattgtctgtgccggatgcggcgtgaatgccttatccggccaataaaatcctaccaattcaataagttgatattctttcatgctcttataaaggtcgtgcctctggcggatgtacgtttgtcatgagtctcactctgttgctaattgccgttcgcccctgaacatccactcgatcttcgccttcttccggtttattgtgttttaaccacctgcccgtaaacctggagaaccatcgcgtgtttcaaaaagttgacgcctacgctggcgacccgattcttacgcttatggagcgttttaaagaagaccctcgcagcgacaaagtgaatttaagtatcggtctgtactacaacgaagacggaattattccacaattgaaagccgtggcggaggcggaagcgcgcctgaatgcggtgcctcatggcgcttcgctttatttaccgatggaagggcttaacagctatcgccatgccattgcgccgctgctgtttggtgccgaccatccggtactgcaacaacagcgcgtagcaaccattcaaacccttggcggctcaggggcattgaaagtgggcgcggatttcctgaaacgctacttcccggaatcaggcgtctgggtcagcgatcctacctgggaaaaccacgtagcaatattcgccggggctggattcgaagtaagcacttacccctggtatgacgaagcgactaacggcgtgcgctttaatgacctgttggcgatgctgaaaacattacctgcccgcagtattgtgttgctgcatccatgttgccacaacccaacgggtgccgatctcactaatgaccagtgggatgcggtgattgaaattctcaaagcccgcgagcttatcccattccttgatattgcctatcaaggatttggtgccggtatggaagaggatgcctacgccattcgcgccattgccagcgctggattacccgctctggtgagcaattcgttctcgaaaattttctccctttacggcgagcgcgtcggcggactttctgttctgtgtgaagatgccgaagctgcaggccgcgtactggggcaattgaaagcaacagttcgccgcaactactccagcccgccgaattttggtgcgcaggtggtggctgcagtgctgaatgacgaggcattgaaagccagctggctggcggaagtagaagatatgcgtactcgcattctggcaatgcgtcaggaactggtgaaggtattaagcacagagatgccagaacgcaatttcgattatctgcttaatcagcgcggcatgttcagttataccggtttaagtgccgctcaggttgaccgactacgtgaagaatttggtgtctatctcatcgccagcggtcgcatgtgtgtcgccgggttaaatacngcaaatgtgcaacgtgtggcaaaggcgtttgctgcggtgatgtaatgcaggaaagcaggctggaattacccagcctgcagtgaaattaaactgtcgtcgctttcactctttctttatagatgatttttttgataccatcgttctacgtgagagataataaacgttgttagttcttttattgttaagtttatcccaattatctggaattcctttccctgtttttttcgtgtggagtaataatttctgcacatctaaccattattaaa

SEQ ID NO: 1661 - DNA, 6748 bp, Escherichia coli
  Strain O55:H7
  modified_base (1831)..(1831): a, c, g or t
  modified_base (4205)..(4205): a, c, g or t
  modified_base (4946)..(4949): a, c, g or t
  modified_base (5154)..(5154): a, c, g or t
  modified_base (5917)..(5917): a, c, g or t
  modified_base (6640)..(6640): a, c, g or t
taataagtatcgggtttgttacgatagaatttttctatatcctcaagaatatgctttgccttattgcctgtgactttctgacattcaatttcagtatcattaaattctaaagttaaagagaactcctttgtgtaagtttaaccttatattgattactaatatcaaatgaaaaggtcctgtaatgagaataatcatctttaacctcctcggcaaaacagcaaagcgtgcaaatatacatacaatctttcttacccctgattttgttaactaaatcaataaaagcgtgaaaaactgtacttgcaatagaacttgatacttcttcttcaggtctacaaaaatcttttgcaatttttaactgtgtttctatatataaaaagaaatctttggcataagaaaaatctttgttattttgtacatctaactcaataggtaaagatgtcgttttgttgctattcacatatgatatattcatataatcatctccttcgggagtaataaaattaatcaccattgtagggtagggttctggtcaatcagaaatcatctttataaacttcgattgtttttgtaatgctgtatcattaagttcattaaatcgtacagcagataaatgttctatcaaatttcgctcatttgcagagtattcatcataataaacgtaaaattaatgtatccttacatcgagcattaaccattttttacaaaaaaacgacaggaacgtatttactaggttaaatataatcatcctgcttttcatcacaaaaaccgcagataatccttcctttcccctgtagctggcgttatggtcagatagtttttgcaacaaatctcacaataaaaagtttcaacatactgactatttagggaaaaatatgcgcaagatcacacaggcaatcagtgccgtttgcttattgttcgctctaaacagttccgctgttgccctggcctcatctccttcaccgcttaaccctgggactaacgttgccaggcttgctgaacaggcaccaattcattgggtttcggtcgcacaaattgaaaatagcctcgcagggcgtccgccaatggcggtggggtttgatatcgatgacacggtacttttttccagtccgggcttctggcgcggcaaaaaaaacttctcgccagaaagcgaagattatctgaaaaaccctgtattctgggaaaaaatgaacaacggctgggatgaattcagcattccaaaagaggtcgctcgccagctgattgatatgcatgtacgccgtggtgacgcgatcttctttgtgactggtcgtagcccgacgaaaacagaaacggtttcaaaaacgctggcggataattttcatattcctgccaccagcatgaatccggtgatctttgcgggcgataaaccagggcaaaatacaaaatcgcaatggctgcaggataaaaatatccgaattttttatggcgattccgataacgatattaccgccgcacgcgatgtcggcgctcgtggtatccgcattctgcgtgcctccaactctacctacaaacccttgccacaagcgggtgcgtttggtgaagaggtgatcgtcaattcagaatactgacagagcgggagagcgtgacactctcccgaatgctgtttttttaatcacacctttatactttcgctgtcttgctgcaaactgattaagagagttttatcaaggagcagcacatgtggtatcaaaagacgctcacgcttagcgccaaatctcgtgggtttcatctggtaacggatgaaattctgaatcagctggctgatatgccgcgcgttaacatcggcttactgcatctgttgctgcaacatacntccgcctctctgacacttaatgagaactgtgatcccaccgtacgccacgacatggagcgttttttcctccgcaccgttcccgacaacggaaattatgagcatgactatgagggagcagacgatatgccttctcatatcaaatcctcaatgctgggaacatcgcttgtattgccggtgcataaagggcgtattcagaccggcacctggcaaggcatttggctgggggaacatcgcatccacggcggatcgcgtcgcatcatcgcgacactacaaggggagtaaaaaatgaccatttcggagttgctacaatattgcatggcaaaaccaggcgcagaacagagcgtgcataacgactggaaagcgacgcagatcaaagtggaagatgtactgtttgcgatggtgaaagaagtagaaaatcgcccagctgtttcgctgaaaaccagcccggagctggcggagctgctacgtcagcagcacagcgatgtgcgtccaagccgccatctgaataaagcgcactggagcaccgtgtatctcgacggttcgctgccggattcgcaaatctattatctggtggatgcgtcttatcagcaggcggtgaatttactgccggaagaaaaacgtaaattgctggtgcaactctgaaaggaaaaggccgctcggaaggcggccttaacgattacagcatcggcttgaggaagcgtgccgtatgcgaagcttcgcactccgcgacggtttctggcgtaccggagacgaggatctcgccgccgccactgccgccttccggccccaggtcgacaatccagtcagcggttttaatcacgtcgagattgtgctcaatcaccacaatggtgttgccctgatcgcgcagtttatgcagtacgtcgagcagttgctgaatatcggcgaagtgcagaccggtggtcggctcgtcgagaatatacagcgtctgcccggtgccgcgttttgacagctcacgcgccagcttcacgcgctgggcttcaccaccagaaagtgtggttgcggactgccccaagcgaatgtacgtcagaccaacgtccatcaacgtttgcagcttacgcgccagagctggcaccgcatcaaagaactcacgcgcctcttcgatggtcatatccagcacttcgtggatggttttgcctttgtacttaatctccagcgtttcacggttatagcgtttacctttgcactggtcgcacggcacgtaaatgtccggcaggaagtgcatctccactttgatcacgccatcgccctgacaggcctcgcagcgtccgccacggacgttaaagctgaaacgtcctggcgtataaccacgcgcacgggattccggtacgcccgcaaacagttcgcgcacaggcgtaaacacgccggtataggtcgccgggttagaacgcggagtacgaccaattgggctttggtcgatatcgattactttgtcgaaatgctccagtccctgaatatcgcgatacggtgccggttcggcgatggtcgcaccattcaactggcgttgggcaatcgggaacagtgtgtcgttaatcagcgtcgatttaccggaacctgaaacccctgtgatgcaggtaaacagaccgactggcagcgttagcgtcacgtctttcaggttgttgccgcgtgcgccagtcagcttaagtactttttccggattcgccggaacgcgtttcttcggcacttcaatcttgcgtttaccgctcatgtactgtccggtcaacgactccggcaccgccataatcgcttccagcggaccttccgcgaccacttcaccgccatgtacacctgcaccaggaccgatatcgatcacatgatcagcggcgcgaatcgcgtcttcgtcgtgctccaccacaatcacggtattaccgagatcgcgcagatggataagcgtacccaacaggcgctcgttatcgcgctggtgcaggccgatagacggctcatccagcacgtacataacgccaaccaggcccgcaccaatctggctcgccagacggatacgctgggcttcaccgccggaaagcgtttctgccgagcgggaaagcgtcaggtaattcaggccgacgttaacgaggaatttcaaacgatcgccgatctctttaagaattttttccgcaatcttcgcccgctgacctgcgagtttgagattgttgaagaattccatcgcatgaccaatgctcatgtcggagatggcgggcagcggcgtattctcgacatacacgtggcgcgcttcccgacgcagacgcgtcccttcgcagctggcgcacgggcgattgctgatgaacttggctaattcttcacgtaccgcactggattctgtctctttataacggcgctccatattgtgcagcacgcnttcgaacggatgacgacggatggaggtatcgccacgatcgttcatgtatttgaattcaatgttttctttgccagaaccgtacaacaccactttatgcacgttcgcgctcaggctgccccacggcgcttcgacgtcgaacttatagtgatctgccagcgatttcagcatctggaaataatagaagttgcggcgatcccagccacggatcgcaccacctgccagcgacagttccggattctggatcacgcggtcaggatcgaaatattgctgtacgccaaggccgtcgcaggtcgggcaggcacctgccgggttgttaaacgaaaacagtcgcggctccagttcacgcatactgtagccgcaaattgggcaggcgaagttggcggaaaacagcagctcttccgctttcgggtcgtccatatccgccactaccgcggtaccaccggaaagctccagcgcggtttcaaacgactcggcaagacgttgggtaagatcgtcacgcaccttgaagcgatcaaccaccacttcaatagtgtgtttcttttgcagttccagtttcggcggatcggaaagatcgcagacttcgccatcaatacgagcacggatgtaaccctggcttgccaggttctccagcgttttggtgtgttcgcctttgcgctctttaatgattggcgcgagcagcatcagacgcttgccttccggctgcgacagcacgttatccaccatctggctgacggtttgcgnnnncagcgggacgtcgtggtccggacagcgcggttcgccgacgcgggcgtacaacaaacgcaaatagtcgtggatttcggtgattgtccccaccgtagaacgcgggttatgagacgtcgatttctgctcaattgagatggcaggagaaagcccctcaatatgatcgacgtccggcttttccatcagtgacagaaactgccgcgcgtangcggaaagggattcaacgtaacggcgctgcccttcggcatataaggtgtcgaaagcgagcgaggatttgccagaacccgaaagcccggtcacgacaatgagcttgtcgcgggggataacgaggttgatgtttttgagattatgggtgcgggcgccccgaacttcgatcttatccattcacctttcccggattaaacgcttttttgcccggtggcatggtgctaccggcgatcacaaacggttaattatgacacaaattgacctgaatgaatatacagtattggaatgcattacccggagtgttgtgtaacaatgtctggccaggtttgtttcccggaaccgaggtcacaacatagtaaaagcgctattggtaatggtacaatcgcgcgtttacacttattcagaacgattttttttcaggagacacgaacatggccagcagaggcgtaaacaaggttattctcgttggtaatctgggtcaggacccggaagtacgctacatgccaaatggtggcgcagttgccaacattacgctggctacttccgaatcctggcgtgataaagcgaccggcgagatgaaagagcagactgaatggcaccgcgttgtgctgttcggcaaactggcagaagtggccagcgaatatctgcgtaaaggttctcaggtttatatcgaaggtcagctgcgtacccgtaaatggaccgatcaatccggtcaggatcgctacaccacagaagtcgtggtgaacgttggcggcaccatgcanatgctgggtggtcgtcagggtggtggcgctcctgcaggtggcaatatcggtggtggtcagccgcagggcggttggggtcagcctcagcagccgcagggtggcaatcagttcagcggcggcgcgcagtctcgcccgcagcagtccgctccggcagcgccgtctaacgagccgccgatggactttgatgacgatattccgttctgatttgtcattaaaacaataggttatattgttttaaggtggatgattaaagcatctgccagccataaaaaagaagcctccgttatggaggcttctacgtatcaggtcaaaatcattggccactgtggcggtgtctgattcatctcttctatcatcaccgactcgatgttgtgccagatggcggtgatgtccgccattgtgatgccaagcaaccccattgcgaaccagcaggcggaaaccacgcccagaccgctgctgatcactgcaagcccgacataatcagaccgacgaaaacggatgttgagcgtgctggccagaaacatcattacggcactaagaagttgccagcgaagaagaaccacgccagtggtgagggtagccatcaaacaattcctctgaaaagagccgatgccctggacagcgcggcgttgttcacgggaggcgtggtacactctggctatcgcggggcttgcagaacacaaaaatgaaacactctgtttgtttcattaattttgtgaactntatcacaattgattgtttgttagccagattaggtcgtgacttttattgctgtacagattatgtggtttttcagtggcattaagggtatatcttcccgccgcctctgta

SEQ ID NO: 1662 - DNA, 23218 bp, Escherichia coli
  Strain O55:H7
  modified_base (2)..(2): a, c, g or t
  modified_base (1059)..(1059): a, c, g or t
  modified_base (1336)..(1338): a, c, g or t
  modified_base (4710)..(4710): a, c, g or t
  modified_base (9547)..(9547): a, c, g or t
  modified_base (9569)..(9569): a, c, g or t
  modified_base (10234)..(10234): a, c, g or t
  modified_base (10669)..(10672): a, c, g or t
  modified_base (12748)..(12748): a, c, g or t
  modified_base (12938)..(12938): a, c, g or t
  modified_base (13448)..(13448): a, c, g or t
  modified_base (13834)..(13834): a, c, g or t
  modified_base (15883)..(15883): a, c, g or t
  modified_base (17661)..(17661): a, c, g or t
  modified_base (19452)..(19452): a, c, g or t
  modified_base (19937)..(19938): a, c, g or t
  modified_base (21421)..(21421): a, c, g or t
  modified_base (22902)..(22903): a, c, g or t
  modified_base (22906)..(22906): a, c, g or t
tnaattttgaatatcaatgaattattttcatccaagtgacgattaaaaaggtatcaatttcaaatcaggcaaaagtgctatttataccgtaagatttatctaaagacgtcggtagccagggtttcaccttgcaatggccgggtataaacaggcaggaaattgatagcaatgaatcatcgtgcacgacaccaattactggcgttgccgggcattatctttttagttctctttcccatcattctttcgctatggattgccttcctttgggcaaaatcagaagtgaataatcagctccgaacctttgctcaactggcgttggataaatccgagctggtcattcgccaggcagatttagtgagcgatacagttgaacgctatcaggggcaagtttgcactccagcccatcaaaagcgaatgttgaatattattcgtggctatctttatattaatgaattgatctatgcccgtgataatcattttttatgctcatcgctgatagtgcctgtaaacggctatacgattgtatcggccgattataagcgtgaacctaatgtttctatctattattaccgcgatacgccttttttctctggctataaaatgacctatatgcagcggggaaattatgtggcggttatcaaccctctcttctggagtgaagtgatgtctgatgacccgacattgcaatggggtgtgtatgatacggtgacgaaaacctttttctcgttaagcaaagaggcctcagcagcaacgttttctccgctgattcatttgaaggatttaaccgtacaaagaaatggctatttatatgcgacagtttattcgacaaaacgcccaattgcagccattgttgcgacttcatatcaacgtcttatagcccatttttataatcatcttatttttgcgttgcccgccggtattttggggagtcttgttctgctattactctggctacgtattcgacaaaactatttgtctcccaaacgcaaattgcaacgcgccctcgaaaaacatcagctatgcctttattaccagccaataattgatatcaaaacaganaaatgtatcggcgctgaagcgttgttacgttggcctggtgagcaggggcaagtaatgaatccggcagagtttattccgctggcagaaaaggaggggatgatagaacaggtaactgattatgttattgataatgtcttccgcgatctgggcgcgtaccttgcaacacatgctgatcgctatgtttctattaatctgtcggcctccgattttcatacgtcacggttgatagcgcgaatcaatcagaaaacagagcaatacgcggtgcgtccgcagcaannnaaatttgaagtgactgagcatgcatttcttgatgtcgacaaaatgacgccgattattctggctttccgccaggctggttacgaagtggcaattgatgattttggtattggctactctaacttgcataaccttaaatcattgaatgtcgatattttgaaaatcgacaaatcgtttgttgaaacgctgaccacccataaaaccagtcatttgattgctgaacatatcatcgagctggcgcacagcctggggttaaaaacgatcgctgaaggcgtcgaaactgaggagcaggttaactggctgcgcaaacgcggcgtgcgctattgccagggatggttctttgcgaaggcgatgccgccgcaggtgtttatgcaatggatggagcaattacccgcgcgggagttaacgcgcgggcaataaaactacaggcggtggcgataatcgctgggagtgcgatcaaactgccgacggaaaacgcgggagaaggtctgctgagagacataacccaggtccattgcgatatcaaaaatcggacgctcggtggtgcgcaactcaacggcggccagtaacagacggcgttgacgaatgtaatcgccaagcgtctgatgcgtcaccgtgcggaacatccgttgcaggtaccactttgaatagcctgatttttttgcgacgacatcaatgttaagcggctggtcaatatgctcgtcaatccatgcgataagatcctgaataattttctgatgggacataaatctgcctcttttcagtgttcagttcgttaattcatctgttggggagtataattcctcaagttaacttgaggtaaagcgatttatggaaaagaaattaccccgcattaaagcgctgctaacccccggcgaagtggcgaaacgcagcggtgtggcggtatcggcgctgcatttctatgaaagcaaagggttgattaccagtatccgtaacagcggcaatcagcggcgttataaacgtgatgtgttgcgatatgtcgcaattatcaaaattgctcagcgtattggcattcctctcgcgaccattggtgaagcgtttggcgtgttgcccgaagggcatacgttaagtgcgaaagagtggaaacagctttcgtcccaatggcgagaagagttggatcggcgcattcataccttagtggcgctgcgtgacgaactggacggatgtattggttgtggctgcctttcgcgcagtgattgcccgttgcgtaacccgggcgaccgcttaggagaagaaggtaccggcgcacgcttgctggaagatgaacaaaactaaagcgccacaagggcgctttagtttgttttccggtctttgtctttctctctatcccgctggtacacaggagggtttcccccgacgtcaacacacctcattcgagcacgtggtggaggttccggttggtgttgatgctttaattgtatgtcaccgacgtttcttcgccagtgtaaaagtatactttttagccgcaatatttttgtcatctcagacgattttttatcgcaatcctcaacggtatacggctcgataacgctgcaatcttgcgcatcgacgataacgtttgcgcatcaattgcctggtttttcatcgtcaagacaataaaagagaaaaaagcagcaaacttcggttgaaaaagccgctatgatcgccggataatcgtttgctttttttaccacccgttttgtatgcgcggagctaaacgtttgcttttttgcgacgcagcaaattgtcgcaaacctggagcaggaagataacgtttcgctggcaggggattgtccgccacgcatcttgacgaaaattaaactctcaggggatgttctcttatgtctacgccatcagcgcgtaccggcggttcactcgacgcctggtttaaaatttcacaacgtggaagcactgtccgtcaggaagtggttgccgggttaacaacgtttctggcgatggtctactcggttatcgtcgttccaggcatgttgggtaaagcgggcttcccgcctgcggcagttttcgttgcgacctgtctggttgccggactcggttctatcgtgatgggtctgtgggctaatctgccgttggcgattggttgcgccatctccctgacggcgtttaccgcattcagcctggtgctggggcaacatattagcgtacctgtcgcgctgggtgccgtgttcctgatgggtgtgctgtttacggtaatttctgccacgggtatccgtagctggattttgcgcaacttgccgcacggtgtggcgcacggcacggggatcggtatcggtctgttcctgctgctcattgccgctaacggtgtcggtctggtgattaaaaacccgcttgatggtctgcccgttgcgctgggtgatttcgcgaccttcccggtgattatgtcactggtaggtctggcggtgatcatcggcctggaaaaactgaaagtccctggtggcattctgctgaccattatcggtatctcaattgtcggtttgatcttcgatcctaacgtccatttctccggcattttcgccatgccttcattgagcgatgaaaacggcaattcactgattggcagcctggacattatgggcgcgctgaatcctgtagtcctgccaagcgttctggcgctggtgatgacggcagtatttgatgccaccggaactatccgcgctgtcgccggccaggcgaacctgctggataaagatgggcagatcatcgacggcgggaaagcactgaccactgactccatgagcagcgttttctctggcctggtgggtgcagctccggcagcggtatacatcgagtctgcggcgggtacggcggcgggcggtaaaaccggtttgacggctatcaccgttggcgtgctgttcctgctgattctgttcctctctccgctttcttacctcgttccggggtatgcaacggctccggcgctgatgtacgttggcctgctgatgctgagcaacgtggcgaaaatcgactttgctgattttgttgatgcgatggcgggtctggttacggcggtattcatcgtgctgacctgtaacatcgtaacaggcatcatgatcggcttcgcgactctggtgattggtcgtctggtttccggtgaatggcgcaagttgaacatcggtacggtcgttatcgccgtggcgctggtgaccttctatgcgggtggctgggctatctaatctttcatcggattctgaaaacgggtggcaatggctgcccgtttttattttctccgcacattgtgtgagcttttgcgatattctgaaaaaatgagaattcaggcataacgtctttctcagatcataaaaaacatcgcaaacagggaacgcatggaaatcttcttcaccatactgataatgaccntcgtggtctcgctgtccggggtggtcactcgtgtcatgccctttcagatcccgcttccgcttatgcaaatcgccatcggtgcgctactggcgtggccgacgtttggtttgcatgtggagtttgatcctgaactctttttagtcttgtttatcccgccgttgctgttcgctgatggctggaaaacgccgacccgtgaatttctcgaacatggtcgagagattttcggcctcgcgctggcgctggtggtggtcaccgtggtcggcattggcttccttatttactgggtggtgccgggcattccgctgatccccgcctttgcgctggcggcggtgctttctccgaccgatgctgtggcgctctccgggattgttggcgaagggcgcatcccgaaaaaaatcatgggcattttgcagggcgaagcgttgatgaatgacgcctccggcctggtgtcgttgaagtttgccgtggcagtggcgatggggacgatgatcttcaccgtcggcggtgcgacggtcgaatttatgaaagtagccattggcggtattctcgccggttttgtggtgagctggctgtacggtcgctcgctgcgattcctcagccgctggggcggtgatgaacccgcgacgcagatcgtcctgctgttcctgctgccattcgcttcttatctgattgccgaacatattggcgtttccggcatcctcgctgcggttgccgccgggatgaccatcacccgctccggtgtgatgcgccgtgcgccgctggcaatgcgcctgcgtgcaaacagcacctgggcgatgctggaatttgtctttaacggcatggtgttcctgctgttaggtctgcagctgccgggtattctggagacgtcgctgatggcagcagaaatcgaccctaacgtcgaaatctggatgctgtttaccgatattattctgatatatgcggcgctgatgctggtccgtttcggctggctgtggacgatgaaaaagttcagcaaccgcttcctgaagaagaagccgatggagtttggttcgtggaccacacgagaaatcctgatcgcgtctttcgccggggtgcgtggggcgatcactttggccggtgtgctctctatcccgctgctcttgccggatggtaacgtcttcccggcgcgctatgagctggtgtttctggcggctggtgtcattctcttctcgctgtttgtcggcgtggtgatgttgcctattctgctacaacacattgaagtcgcggaccattcgcaacaattgaaagaagaacgtattgcgcgagcggcaacggcagaagtggcgattgtggcgatccagaaaatggaggagcgtctggcggcggataccgaagagaatatcgataaccagctgattacggaggtcagttctcgcgtcattggtaacctgcgtcgtcgcgccgatggacgtaacgacgttgaaagttccgtgcaggaagagaaccttgagcgtcgcttccgtctggcggcattgcgttctgaacgtgctgaactgtaccacctgcgcgccacgcgggagatcagcaacgaaacgctgcaaaaattactgcacgatctcgatttgcttgaagcgttgctaattgaggaaaatcagtaagccgaaagcgacgtaaccaggcccgaggtaatctgaaaaaggtgcaatcttttgcacctttaacaggttagctcgggctaacattcatgattctaaaacaaataagttatctctcttttaaagtcatttcattggctgttcttcgacttaatctcaatctgcgtgttgcataatatctgcagtaatcttcatagctacttcatgagtattattctcagtttgtgacatgccagtatgagaggtacaatcttcttcaaagaatttctgtagtgttaccagggtatcactattaatgggaatattctcctccccacggagaatggaaatgcccattccctggacgctagcctcatcgaaattaacccgatagagacgggtattaaacatccaggcttttgttaaaacagaacagttgaaatggcaattgtttaaattggcattattaaaattaacattagccatattagaatcggtgcatataaccatttcgaggaacgtatttgttagccgtgtaaaaaagagtttactatcaattaagtttatattctggaggattgctttgttcagattgacgcgagacagatcagcatgttcaaagttaattaaatcaagtttagagaagctaaggtcggctctaaataaattaatatatggcgctattactttataaagatttacctcagccatgtatgccatataaaaatttgaataatcaaggaaggtatttttaatattggctctattcattgttgcattgtagaattgaacatgcatagcggagcatgaatttagagttccgtcagtcatttttatctgagcgaaatatgagtcatcgagaatacaattatcaaaaagtattttttccattatggcgaaattaaaattcgttttatacatattacagtcctggaaaatagcgttttgtagtctgcaacctgcaaaattcgaattggataaatcttcatctttaatcacgatacctttcaggctaaggtgtgaaaaatcgtaaccaccatttactgtctgtgggatttcgatagtattattatggacggtgacattatttataaaatataccaccttaattgacacttccttatctttattaaggtaaactcttctcgtaattctatcgtcacatttattatttgcatgtgaagctatatctataaaatatttatgtattttcctgtccgtttctttcgtgatttttcctgatggtaaactatcataaattcttttcattttctgaatcaagtctatcactttttcatgatcatccattttgaaaagagagagggctttattgtcaattaacgtgtttttatgatgtttgctgtaattatctgattttgttttctttgtatgtgatggacttgtgacagagtggttatcgttaatcaggcaaagagggaaaaacatattatttaaaccattatagcgcataaagtatccttataattaacaagaaagaaaaggcatattctctgcattatcattttctacgactgtcaaaaatcgctcatttttttttaatgagtttatttgtttaatattatgggaaaaggtgatgcatttgggagaggaagagtattccccggtcagacgaccggggaaggggagagattaatgcgcgcggccttgctcaacgccaaagccggtctgggagcggataaactgcgcgcggaacagttcacgctcacgcgcgccttccgctgagttatcggttgccgagaagaaccagatgccgaggaatgccacggtgatagagaacagcgccggtattcatacgggaagatggctttttcgtgaccgaggatctgtacccaaatcgtcgggccgaggatcatcagtaccactgcggtaatcagccccagccagccacccatcatcgcgccacgcgtggtcagtttcgaccagtacatagaaagcagaatgatcgggaagttacagctcgccgcgatggcaaacgccagccccaccataaaggcgatgttctgattctcaaacagcacgccgaggataatcgcaatcacacccaaaatcaggacggtgattttcgatacccgcagctcttcacgttcggtcgcgccttttttgaagacgttagcgtacaggtcatgcgaaaccgctgatgcgcccgccagcgtcagacccgcaaccaccgcgaggatagtggcgaaagcaaccgctgaaataaagccgaggaacaggttgccgcccaccgcattggccaggtgaactgctgccatgttgttaccaccaatcagatggcccgccgcgtctttatattccggattcgcaccgaccagcatgatcgcgccgaagccgataataaaggtcaggatatagaagtagcccataaatccggtagcgtagaacacgctcttacgcgcttcgcgggcatcgctgaccgtaaagaagcgcatcagaatgtgcggcaagccagccgtaccaaacatcagtcctagccccagagagagtgcggagatcggatctttcaccagtccgcccggtttcatgatgtcgacacctttcgggtgtaccgccatcgcttcgctgaacagattgttgaagctaaagccgacgtgtttcatcaccataaaggccataaagctggcaccgaacagcaacagcacagctttgataatctgtacccaggtggtcgccagcatgccgccgaacaggacgtacatcatcatcagcacgccgaccagcaccactgcaatgtgatagttaaggccaaacagcagctcgatcagtttacctgcgcccaccatctgggcgataaggtaaagcgccaccaccaccagagaaccacaggccgaaagaatacgaatcggcccttgtttcagacgataagaggctacatcggcaaaggtgtaacgccccaggttacgcagacgttcggcaatcaggaacaaaatgatcggccagcccaccaggaagcccagcgagtaaattaagccgtcatagccggaggtaaacaccagtgcggagatccccaaaaatgaggcggcggacatatagtcaccggcaatcgccagcccgttctgaaaaccggtgatattgccgcctgcggtgtaatagtcattacgcgaacgtacgcgttttgacgcccagtaggtaatgccgagcgtaaacacgacgaaaatcaggaacataataatcgcctgccagttcgttggctggcgctctacggccccgctaatagcatccgnggcgttagctgcgaaagggagngtggcggcaagcgccgtcagaactcttttcatgatgcttgtacctcatgcaggacttcattattaagacggtcgaattcgccgttcgcccgccagatgtagataccagtgagaacaaaggagatcactattaccccaacaccgactggaataccgcgtgtgacgctggtgttcggattcagcggggtgcccagccagccgggcgcgaaggcgatcagtaaaataaagccgatataaactgccagcataataatcgacaggatggtggcaaaccgttgccgtttttcgactaactccctgaaatgcgcattgtcttctatccgctgataaatagtgccattcatcacagattctccagaggtaatgtagggattgttttaattcccgctcccttatgggagaaggttaacgctcgggtaacccttgccgaatgtaggccggataaggcgttatacgccgcatccggcaatcaatgcctgatgcgacgctgtcgcgtcttatcaggcctacaaaccgttaccgactcgcatccggcaattgtgggttacgatggcatcgcgatagcctgcttctcttcaagcagcttctcgactacgccaggatcggcaagcgtcgaggtatcgcccaggttgctggtatcgcccgccgcaattttgcgcagaatanggcgcataattttgccggagcgggttttaggcagggagtcggtccagtgcagcacgtctggcgtcgccagcgggccaatctctttacgcacccagttgcggacttctgcgtacagttctggtgacggttcctccccgtgattaagcgtgacgtaggcgtagatcgcctgacctttaatattgtgcggaataccgacgacagcggcttcggcgattttcggatgcgccaccagcgccgactcaatctccgccgttcccagacggtgaccggagacgttcagcacatcgtccacacgcccggtgatccagtaatagctatcttcatcacgacgcgcgccgtcgccgctgaaatacatatttttgaaggtggaaaaataggtctgctcaaaacgttcgtgatcgccaaacagcgtacgcgcctgacccggccaggagnnnntgatcaccaggctaccttcggtagccccttccagcgggttaccttcgttatcgaccagcgccggttgcacgccgaagaacggacgtgttgccgaaccggctttcagctcggtagcgccaggcagcggggtgatcatgaaaccgccggtttcggtctgccaccaggtatcgaccaccggacatttctcgttgccgatttttttccagtaccactcccacgcttccgggttaattggctcgcccacggaaccgagaatgcgcagcgacgaacggtcggtgccttcgatcgctttatcgccttccgccatcagcgcgcgaatcgccgtgggcgcggtatagagaatattgacctgatgcttgtccaccacctgtgccatacgggcaggcgtcggccagttcggtacgccttcaaacatcagcgtggtcgcgccgcaggccagcgggccgtacagcaaataactgtgtccggtcacccagcccacatcggcggtgcaccagtagatatcgcccggatgataatcaaagacatatttaaaggtcagcgccgcgtacaccagataaccgccggtagtgtgcagtacgccttttggttttccggtagaaccggaggtatagagaataaacagcggatcttcggcgttcatctcttccgcctggtgctgatcgctggcttgctcaacctggtcgtgccaccacaggtcgcgcccttcctgccagtcaattttcccgccagtacgcttcagtaccaccacatgctctacgctggtgacgttcgggttttttagtgcgtcatcaacgtttttcttcagcggaatactacgcccggcgcgcacgccttcgtcggaagtgatcaccagtcgtgagttggaatcgataatgcgcccggcaaccgcttccggcgagaagccaccgaaaattaccgaatgcaccgcgccaatacgggcgcaggccagcatcgcaaccgcggcttccggcaccatcggcatataaatcgccaccacatcaccttttttaatgcccagcttgagcagggtattggcgaagcggcagacgtcgcggtgcagctctttatagctgatatgtttgctctggctggcgtcgtcgccttcccagatgatggcggtacgatcgccgttttcttgcagatggcggtcaaggcagtttgccgccagattcagcgtgccgtcctcgtaccatttaatggacacattaccgggggcaaaggagatgtttttcaccttctggtacggtttgatccagtcgagaatttttccctgttcgccccagaaggtatcaggtgcgttaatagattgttgatacatcgcctcgtactgctgagggtttatcaggcaacggtctgcgatgttggcaggaatggtgtgtttgtgaatttgactcatgcttttgttctccttgtaggatgttaataatatgtggcataagcgttaaatgtaggggtattggcagttttgtttagtatttgggcgacagatcacgcaaaagtagaattgtgcaaataaacggcagggtaatttttgaaggtcagcaacaaaagttgattaattctttgaggaacatgcagttatgcatgctgttgaaaaagaggaagatactgactaactctaaagtggtattttacatgcacttacaattgattaaagacaacattcacagtgtggttatttgttacacataggggcgagcaatgtcatgacagtgtaggtgcggttactgtcgtgaaaaacaataaaaaccgccattgcaacaatggcgcaattcggatgaagcccctatgacaaggataaaaataaacgcacgccgtatcttcagcttattgattccttttttctttttcacttctgttcacgctgaacaaacggctgctcccgcaaaacctgtaactgtggaagcgaagaatgaaacctttgccccgcagcatcccgatcaatatctctcctggaaagccacctcggaacagtcagagcgtgttgacgccctggcggaagatccacggctggtgatcctgtgggcggggtatcccttctcgcgcgattacaacaagccgcgtggacatgcntttgctgtgaccgatgtgcgtgaaaccctgcgtaccggtgcgccgaaaaacgctgaagatggtccgctaccgatggcgtgctggagttgtaaaagcccggatgtggcgcgtctgatccagaaagacggcgaagatggctacttccacggtaaatgggcgcgcggcggcccggaaatcgtcaacaacttangttgtgccgattgccataacaccgcctctccagagttcgccaaaggcaaaccggagttaaccctttcccgtccgtatgcggctcgcgcgatggaagccattggtaaaccttttgagaaagccggacgtttcgaccagcaatcgatggtttgcggtcagtgccatgtggagtattacttcgacggcaaaaacaaagcggttaaattcccgtgggatgacggcatgaaagtcgaaaatatggagcagtattacgacaaaattgccttctctgactggactaactccctgtcgaaaacgccaatgctgaaagcgcagcacccggaatatgaaacctggacagcgggcattcacggtaaaaacaacgtgacctgtatcgactgccatatgccaaaagtgcagaacgccgaaggcaaactctacaccgaccataaaattggtaatccgtttgataacttcgcccagacttgtgcgaactgccatacccaggacaaagctgccttgcaaaaagtgntcgcggaacgtaagcagtcgattaacgacctgaaaatcaaggttgaagatcaactggttcacgctcacttcgaagcgaaagcggcgctggacgcaggtgcgacggaagccgaaatgaagccgattcaggacgatatccgtcatgcccagtggcgttgggatctggcgatcgcttcccacggcattcatatgcacgcaccggaagaaggtctgaggatgctcggtacggcgatggataaagcggcggatgcacgcaccaaactggcgcgcctgctggcgactaaaggcatcacccatgaaatccagatcccggatatctcgaccaaagagaaagcccagcaggccattggcctgaacatggaacaaatcaaggccgagaagcagganttcatcaaaacggtgatcccgcagtgggaagagcaggcacgtaaaaacggtctgttaagccaataaccccgttccgcctcgcaaggggcggaaaacacaatggagtgaatatgagcgtattacgttcgttattaactgccggggtgctggcgtcgggcctgttgtggagcctgaacggaattaccgctacccctgcggcgcaggcatctgatgatcgctacgaagttacccagcagcgtaacccggatgccgcctgtctggactgtcataagccagataccgaaggtatgcatggcaaacatgcttccgttatcaacccgaataacaaactgccggtcacctgcaccaactgtcacggccagccatcaccgcaacaccgcgaaggggtgaaagatgtgatgcgctttaacgagccgatgtacaaggttggagagcagaacagcgtctgtatgtcctgccatctgccggaacagttgcaaaaagcgttctggccgcacgatgtccacgtaaccaaagtggcgtgcgccagctgccattccctgcatccacagcaagatacgatgcagacgttaagtgacaaaggacggattaagatttgcgtcgattgccacagcgatcagcgcaccaatccgaactttaacccggcgtctgttccgttgcttaaggagcagccatgacctggtctcgtcgccagtttctcaccggcgtcggcgtgctggcagccgtcagcggcaccgcagggcgcgtggtggcgaaaacgttgaatatcaatggggtgcgttacggcatggtgcatgacgagtcgttatgcatcggctgtaccgcctgtatggatgcttgtcgggaagtgaacaaggtgccggaaggcgtctcgcgcctgacgattattcgtagcgagccgcagggcgaatttcctgatgtgaaatatcgcttcttccgtaagtcttgccagcactgcgatcatgcgccgtgcgttgacgtctgcccgaccggtgcatcttttcgcgatgctgccagtgggattgtcgatgttaatccggatctctgcgtcggttgtcagtactgcatcgccgcctgtccgtaccgcgtgcgctttattcatccggtcacgaagacagcggacaaatgcgatttctgccgtaagaccaatttgcaggccggtaagcttcccgcgtgcgttgaggcttgcccgacgaaggcgctgacgtttggcaatctggacgatcccaacagtgagatttcgcaactgctgcgccagaagcccacttaccgctacaagctggcgctgggaaccaaaccgaagctgtaccgcgtaccgtttaaatacggggaggtgagccaatgacgcagacttccgcatttcattttgaatcgctggtgtgggactggccgattgccatctacctgtttttgattggtatttctgccggtctggtgacgctggccgtgctgttacgtcgcttctacccgcaggcgggcggtgcagacagcacgttgctgcgcaccacgctgattgtcggacttggcgcggtgatcctcggtctgttgatcctcgtcttccacctgacaagaccgtggaccttctggaagctgatgttccactacagttttacctcggtgatgtcgatgggggtgatgctgtttcagctttacatggtggtgctggtgctgtggctggcgaaaatctttgaacatgatttgcttgccctgcaacaacgctggttgccgaagctggggatcgtgcaaaaggttctgagtctgctgacgcccgttcatcgcggactggaaacattgatgctggtgctggcggtgttgttgggggcttataccggttttctgctgtcggcgctgaaatcgtatccgttccttaataacccgatcctgccggtgctgttcctcttctccggcatctcgtccggtgcggcggtggcactgatcgccatggcgatacgccaacgcagtaacccgcattccacggaagcgcagtttgtacaccgtatggaaatccccgtggtatggggtgaaatcttcctgctggcggcgtttttngtcggtctggcgctgggcgatgacggtaaagtgcgtgcgctggtggcggcattgggcggcggtttctggacgtggtggttctggcttggtgtcgccgggctggggctgattgtgccaatgttgttcaaaccgtgggtcaatcgcagttccggcattcctgccgtgctggcggcgtgtggggccagtctggtcggcgtgttgatgttgcgatttttcattctctacgccgggcagttaacggtggcgtaagccagaacagaggtggtttctggacgtattccttcctgaagtcggttttctggcgctgttgttaagtctcggggtcaacgtgttgaccccgttgacggcctttgcgggagtgcggttgcgctggcctgccatgatgcgactcacttgcatcggcattctggcacagttcgcgctcctgctgctcgcctttggcgtactgacgtattgttttctcatcagcgatttctcggtcatttatgtcgcccaacatagctacagcttgctgtcgtggaaactcaaactggcggcggtgtggggcggtcatgaaggttcgctgctgctttgggtgctgctgctttccgcctggagcgcgctgtttgcctggcaatatcggcagcaaaccgatccgctatttccgctgacgctagccgttttatctctcatgctcgccgcactgctactgtttgtagtgctgtggtccgatcccttcgtgcggatatttccaccagcaatcgaaggccgcgatctcaatccgatgctgcaacatcccggtcttatctttcatccaccgctgctttaccttggctatggcggtttgatggtagcggcgagcgtggcgctggcgagtctactgcgcggcgagtttgatggtgcctgcgcccgaatttgctggcgctgggcgttacctggctggagtgcattaactgcggggatcatcctcggttcctggtgggcctactgcgaactcggctggggcggctggtggttctgggatccggtggaaaacgcctctttattaccctggctttctgccactgcgctgctgcacagtttatccctgacacgccagcgggggatttttcgccactggtcgctgttgttggcgatagttactctgatgctgtcgctgctgggcaccttaattgtccgttctggcattctggtttcggttcatgcgttcgctctggataacgttcgcgctgtgccgttgttcagcctgtttgcactgattagccttgcgtctctggctctgtatggctggcgagcgcgggacggtggcccggcggtgcgtttttcggggttatcgcgggaaatgttaatcctcgctacgctgttgctgttttgcgcagtgctactgatcgtgctggtgggaacgctttatccgatgatttacggcctgctgggctggggacgcctctccgttggcgcaccgtattttaaccgcgcgacgttaccgtttggtctgttgatgttggtggtgattgtgctggcgacgtttgtctctggcaaacgcgcgcagcttccggcgctgctggcgcatgcgggcatactgttatttgccgcagggatcgttgtctccagcgtcagccgtcaggagatcagcctgaatttacagccgggtcagcaggtgacgctggcaggatacaccttccgttttgagcgcctcgatctgcaagccaaaggcaattacaccagcgaaaaagcgatagtggcgctgtttgaccatcagcaacgcattggtgaattaacgccggagcggcgtttttacnaagctcgtcgtcagcaaatgatggaaccgtcaattcgctggaacggcatccatgactggtatgcggtcatgggggagaaaactggagcggatcgttacgcttttcgcttgtatgtacaaagcggtgtgcgctggatctgggggggaggattgttgatgattgcgggcgcattgttaagcggatggcgggggaagaagcgcgatgtataaagggcttctcacgctactgctgttatttacctgttttgcgcgcgctcaggttgtagacacctggcaattcgccaatccgcaacaacagcaacaggcgttaaatattgccagccagttacgttgtccgcagtgccagaatcaaaacttactggaatccaacgcgccggtggcagtcagtatgcgccatcaggtttacagcatggtggcggaggggaaaagtgaagtcgaaatcattggctggatgaccgaacgctacggagattttgttcgctataacccaccgttaacgggtcagacgctggtgttgtgggcgctgccagtggtgttgttactgctgatggcactgatcctctggcgagtgagggcgaagcgatgaaacagcctcaaataccggtgaaaatgctgacaacactcacgatattgatggtattcctctgtatcggtagttatctgttaagcccaaaatggcaggcggtacgtgcggagtatcagcgtcagcgcgatccgctacatcagtttgccagccagcaaaacccggaagcgcagcttcaggcattgcaggataaaatccgcgctaatccacaaaacagcgaacagtgggcgttactgggcgagtactatctgtggcaaaacgattacagcaattcgctgctggcgtaccgtcaggcgttgcaactacgtggtgagaacgctgaactgtatgcggcgctggcgacggtgctttattaccaggccagccagcatatgaccgcccagactcgcgcaatgatcgacaaagccctcgcgctggactctaacgaaatcaccgctctgatgctgctggcttccgatgcgtttatgcaggcgaattacgcgcaagccatcgaactatggcaaaaagtgatggatctcaactcaccccggatcaaccggacacagctggtcgagtcgattaatatggcgaaattgttgcagcggagatcggattaatcatctggtgatgaagattatgttattgagctgcataaaaaataatcgaatgaacatatgccaaaaataatcactaatcagtattattgcagattaaacaaataaaaatctttccataacaaatggttattcattaatcctgccataaactcgcgttattatgcattaatgcagcgaaaagctctgttgttaaagggttgcgcaacataccgcgcaaatgatactgatcataagcgttaaaaaaatctacaaaccaacgcaacacaattcatgccctggcagtatgtcacgttctcgcgtttctgaacggggaacggcgctccattgaggaagtcattcatatgaaaaatataaaattcagcctggcctggcagattctgtttgctatggtgctgggcattctcctgggaagctacctgcactaccatagcgacagccgcgactggctggtcgtcaatttgctctctccggcgggtgatatcttcatccatctgatcaaaatgattgttgtgccgattgtgatctccacgctggtggtgggtatcgcgggtgttggtgatgccaaacagctcgggcgtattggcgcgaaaaccattatctacttcgaggtgancaccaccgttgccatcattttggggatcactctggcgaacgtcttccagcccggtgccggggtggatatgtcgcagctggcgaccgtcgatatctcgaaatatcagagcactacggaagcggtacaaagcagttcccacggcattatgggcacgattttgtcgctggtgccgacgaatattgtggcgtcgatggcgaaaggagaaatgttgccgatcatcttcttctcggtgctgtttggtctggggctttcctccctgcccgcgacgcatcgtgaaccgctggtgaccgtgttccgctccatctctgaaaccatgtttaaagtgactcacatggtgatgcgttatgcgccggtgggtgtgtttgcgctgattgcagtgacggtggctaactttggtttctcttctctgtggccactggcgaaactggtgctgctggtgcatttcgccattctgttcttcgcgctggtagtgctgggaattgtgnngcgcctatgcgggttaagcgtctggatcctgattcgtattctgaaagatgagctgattctggcgtactccactgccagctctgaaagcgtactgccgcgaattattgagaagatggaagcctacggagcaccggcgtcgatcaccagcttcgtggtgccgaccggttactcttttaaccttgatggttcgacgctgtatcaaagtattgccgctattttcatcgctcagctgtatggcattgacctgtccatctggcaggaaatcattctggtgctgacgctgatggtgacctcgaaagggattgctggcgtgccgggcgtgtcgtttgtggtgttgctggcaacgctgggtagcgtaggtattccgctggaaggtctggcgtttattgctggtgttgaccgtatcctcgacatggcgcgtactgcactgaacgtggtgggtaatgcgctggcggtgctggtgattgccaagtgggaacacaaatttgaccgcaaaaaggcgctggcttatgagcgtgaagtgctgggcaaatttgataaaactgcggatcaataattgaagattgccggggatatcccccggcaatgtgtggatgcctgatgcgacgctggtgcgtcttatcaggcctacgtcagacagcgctagcgtgattttgtaggtctgataaggcgtttacgctgcattcgacatcaacgcctgatgcgacgcttaacgcgtcttatcaggcctaccttaaccgttagttaatttttcaaactcttcacacccggtatcaaacccttccatacagctcaggttcaaccagtgcagcgccttttgcttgttcttctcgataaaaccttcttcaccgtttaagaacatcattcccgcccagtactcggaataaccggttcgggaaattgcagagctgcgtttgaaataccaggttgccttgtcatcgtcggccttaatgcccacgccgttggcgtaaatcaaaccaagcagcatttgggcatcgacggcagagtcgttctccagatcttccgaggcgttttctaacagcgaaatcgcctttggataatccggtttacccgcttgagtatttaccagaatatgcgccagcgttacttcaccttctttactgcccgcttgcgccgctttctctgcaagaacttttgcttgtggatagtccagactgaccggattggtgattttgatctgcgccaacagcgcgcaggcatcagcatcaccgctgtcggcggctttctgtgcccaatattcggctttgctcaaatcgccggagctaaaccagctgtcggcaagaaaatattgtgcgcgtcggtccccggcctctgctgcctttaaatactggctgccaggctcggagtcgttggcgtgggcaaagaatgtcaaaaacaacatcaatgcgataatttttttcattttgataatacgattgggtagggagtaaccagtataaagagttcgaatggataaaaaaanagcctccgaaaggaggctgtagaaaggactgtattacgccagtgccgcttcgcgcaggcgagttttcaacttgttgtactcgtcaatcacgtactgctcggcggcgcgctgatcggcgatcggctcgacgcgcacggcgcagtatttgtattccggcgttttcgtaatcgggcttaagttttcggtaaccagctcgttacaggcaccaatccaccactggtaggtcatgtaaatcgcccctttgttcggacgatcgctgacctgcgcacgggtgataattttgcctttacgcgagtgcacccaaaccaatgcctcatcttcaatacccagacgtttggcgtcttcggtattgatttgtgcgtagccaggttcatcagccagcgccgccagtgccgcacagttaccggtcatcgaacggcaagagtagtgaccaacttcacgcaccgttgacagtaccatcgggtactcgtcggtgagtttgtcgattggcgctacccagtcgcaggtgaagaactgcgccagaccgttcggggtgtcaaacttctctttaaacagataagaagtcccctgatcggcatctgaagtatcgcggcaaggccactgaatgaagcccagttcgcccattttctcgtaagtcgcaccgtagaaatccgggcacagatgacgcaactcatcccagatctcctgggtgttgttgtagtgcatcggataacccatacgggtggcgatttcactgatgatttgccagtccgttttcagatcccatttcggttcaactgctttgaagaaacgctggaagccacggtcagccgcagtaaacacgccttcatgctcgccccacgacgttgacggtaaaataacatccgccgccgacgcggttttggtcataaagatgtcctgaacgataaccagttccagatcttcaaaggctttacgtactgccgacagctccgcgtcagtttgtagcggatcttcgcccataatgtacgcggcacgcacttcgccatgcgctgcgcggtgcggcagctcgctgatgcgataaccggtatgagcaggcaggctttccacgccccaggctttggcgaatttctcgcggttagccggatcttttacgtactggtatcccggatacgtatccggcagcgcgcccatatcgcaggcaccctgcacgttgttctgaccacgaaccgggttaacacccgcatgtggcttaccgaggttaccggtcagcatcgcgaggctggtcagagaacgcacggtttccacgccctggtagaactgggttacacccatgccccacaggatggcggcgcttttcgcctgggcatacatccgtgccgcctgacgaatctcactggcgctgacgccggtgatatcttcaaccgactccggcgtgtagccttcaacgattttacgatactcttcaaagccttctgtacgggaagcgacgaatgctttgtcgtacagattttcttcaatannagncaggcccatcgcattcaacagtgcgatgttcgagccgtttttcagtgcaatgtgcatgtcagcaatgcgcgcggtttcaattttgcgcggatcgcagacgataattttcgccccgttacgtttagcgttaattacgtgattcgccacgattgggtgggaatccgccgggttgtacccgaaaacgaacactaaatcggtattatcaatttcgttaatagcattgctcattgcgccattaccgaccgattggtgcagacctgcaaccgatgggccgtgtcagacacgagcgcagcagtcaacgttattggtacc

SEQ ID NO: 1663 - DNA, 11292 bp, Escherichia coli
  Strain O55:H7
  modified_base (1521)..(1522): a, c, g or t
  modified_base (1525)..(1527): a, c, g or t
  modified_base (2806)..(2806): a, c, g or t
  modified_base (5546)..(5546): a, c, g or t
  modified_base (6643)..(6643): a, c, g or t
  modified_base (7817)..(7817): a, c, g or t
  modified_base (7902)..(7902): a, c, g or t
  modified_base (7914)..(7914): a, c, g or t
  modified_base (9464)..(9467): a, c, g or t
  modified_base (10026)..(10026): a, c, g or t
  modified_base (11188)..(11191): a, c, g or t
aatttttgcattacatagttggtttcgttacccgtaccacgcgaggagccggtcgtctggatggcatccggaccgtacttctctttgatggcgctcaggcgctcggcaacgtaattcagtgcctcatcccaggaaacaggttcgagtttgccgccacgctggcgacggatcatgggggttttcaggcgcggggtcaggatctgggtatcgttaatgaagtcccagccataataacccttcagacacagggtaccctggttggttttcccctgcgctgcctccgcccggacgattttgccgttatcgacgaccaggttgattttgcaacctgatgcgcaataggggcaaaccgtgacgacttttttcatcggtctcgctccagttaatcaaatcacgcatacgcgctctcgactacagtatgcatcttttatgccacattttatttggggtcattccctgatattacgggcactatttattcaaaactctgacgaaaaacaggctgtcgtcagttttgacgtgacgaaacgaaataccgcgtgacagccatcacacggcagacattttattttttctcgacgacgggagccgcctgatacccgctgcccagcgatttcatcaactgaatgctttggatcacccggcggctgtccagcatcagtaatgacatctcttcggcaagcaccggcaaccgggcttcggtagcctgtaagcggctggttaagccgcgctgataggcggcctcggcagcgcgctgggtgaagcgcgttgcttccacgcgttcagcctgcatttctcgctcgtcgttgagcgtttgcagacgcgtgccgttgacggcaacgtcacgcaccgcgttcagtactgactggttgtaacgttcaatcatcatgttgctggcggcgcgagtgccttcgagattggcattcaaccgtccaccgtcaaacagcggcaatttcagacccgggatgaagttgaactggcgactggtttttttgaataaggtatccaggtggatggagtccagaccgaaaaacgctttgatatcaaagcttgggtagaacagcgcccgcgcggaatccacctgatctaatgacgcctgaacataccagcgcatggcttgcagatccgggcgtctggcgagcaactcataagagagtgtcgccggaataccggtctggactcgtggtaatgccactggtttgatctccggcatatcgctggctcccgcgccaatcaatgcacgcagagattctcgcgtttcggtgatttgccctttaacggcagcaatttgtttatcgaccgccagaatctgtgcccgcgcgccgtggaaaggcacttgcgcttccagaccgtgcgccactttactttggtgcgctttcaccgcgtaatcaatcacatcgcgagtttgttctaacagatcgagcatctgatagctggcctgcatactgtaataaagctgcgctacgcccgtggtcagcgatagctctactgctgcggtttctgccagcgcggcattatgcnngcnnntggcggcggtaaccgctgagcgatgcacaccccacaaatcaagatccagtccggcaaacaaaccgactgtggcttccgtatagtacggcccgtccatacccagtgctggcgcatccatcgcataagggcttaaaaagccgttcgccgagacgcgttggcggttgagcatccctaacgctgcgacctgtaattgtgaaccggcatctaacaaatcggcctgggactgcgctttttcttcccgcagtttcgcttcggcgagggtgtgtgaaccacttagcgtccgttggatcagcgcatccagctgcgggtcattgagttgtttccaccactgcgcctgcggccagccggagctggcaagatgaatatcatcggccagtttgatttgttccggtttgagctgttgatgaggcgcagaatccttgcgtaccagggcacagccggaaatcagcgtcgtgctgccgagaatgctgcacaacagcagacgtgaaagttgacgattgatcattgcgtggctccttgtgcctgttccgtggcgggcgttaatgccggggctgtccagtctggcaagcgggcgaaaagctggcagacgtgttgctcctgttttaataaggtgggcaggatggcctgcgaggcgggtgtctcttcaagcgttatttgaggagaacggctgagtgcggttgccagaccggcagcgtatttttccagggcgtcggcaaactgacctgctttgtccggctgtagtgcgttatccagcgcctgcgccgagttccaggtggcatcccaggcgtgaagaagatcgcggccctgacgaataaccgtttgcgaacgttcaatcagtaaggcgcgttcttcgctgtccagttgacgctccagcgccacgcgttggcacatctcttcacaggcattaaacgccgcatgcagacctatacgaatttgcagataagtgcgcagagccgtgacttcctgctggcgtgggatccgcattactttacttagcatacccagcgcgccagccagtttttgcggcagcgtgcgcgcttcactttcaggccagacaaaggtgtaaatcaccgcagacaccacggtaccaatgatgatacccagggcgcgatcgcgaatttccaccaggtcgtacaccggaccaaaaacgttttcgagcgtggcgagcgcgaaggtgaccaccatctgtgtgccgatataagaagagcgttcagagctggtggcaatccatgcgcccaacaggaaaatcggtgccagcacaaacagcaattcgacaatnttgtccagccagggcatgaccagtagcgtgaataacagcgccagaatcgcgccgcaaaaggccccgccaaaacgcagcaccatcttctggtacgatgaaccgacattcggattagcgacgatcacgcaggtcagcatacaggtgtgaatgccttcccagtccacgccgctgtagaaggtgtaacagatcaaacaggcgagcagcgtttttaccgcgtagcgcatatagtctggattggtaaaagcatcagcgaccattgatggcggtttggcggcgggcgttggcggcgtattcgggtccatctgacccagttgtaacaacgtctggcagatattctccaggttacattcccgtgccgccatcgcttcactttcactgatccgccagttgctttgccagcactgaccttcggtaatggcatgctgcagcttgttgatttctgaagctaatttttgtcggaattcaataattgcctgagaatcagcaaaagaggtgggatcgtagcgattcagcgtcgagtaaatgtaggttaccgttgccacgcagctttgccaccatgcgctttgagttcgccagttggcatcgtccgcgaggcaaaagacattgagtttttgcagcgccagcgcctctctttcaatccgcgtttcgggtagcggtgcgaggctgtccgtcaggtggctaatggcatcatcaagccgatcattaagcgcttgatgcatttgcgaaatggcacgactgggaaaccacagtacgccgattaacgtcattaataacgtcgggtagaggccaacaacgatacaccacagcgttaagcgcacgaccacttccggatagtcgagcatggcggggaaggtttgcccataaatggcgacaatggcgacagcgaaaaagaccagtcccaaccgatgggtgcgcatcaaaaacatgcagcccatcaggatcggcccggcgatgatcaagcggatcaacggttcgccgtatgaccatttgtagatcaaaaacaggctgccgatctccagcaccgtggcaaccacaaacaagatcgcgacaaatttggtgtaaaacgcgttcgactgaataccgtaaaacagcactgccagcgataacgccacaaaagggatctcaaaagtcatcgagatcagaatcaccagcaggcagcctacccagagttgcacggtctgcggcacgcgacctggtcgccgctcgcttaactcttcatgaaagaacgccagcagcctgaccaccggtaatggcagggagttgagcgcgctcattattgcggctcaagattagcgactgccgaagcgccgatgcggaacatttccgggtcaggtttatcaaccatgattttgaccggaaaacgctgggcaacacggacccagttaatagaacgagaaactttcggcaggccgcccagcaccaggccgccgtcatccggtagcacgccgtagccaattgaatccactttaccctcgaaagttttgccgctgtcactcatcaggcgaatcgttgcaggtgtacctgagcgaatatttttcagatcggtttcgcggaagttggcgatcacttaccagtgacgagtgtcgattagggtaaaaatagggcgcatggcagaagcaaattgcccgacggaggttttgagggaaatgacccggccatcaaacggtgcgcgaacggtcgccatttccagatgcagtttggtcagggcaatatccgcttcgaccgccgcacgctgggcaactaatgcatccacgccgctgacggcgctggcggctgactgcgcctgcaacaatacagcattaagatcggcttctgcagcgcgctgcgcggtcctcgcacggtcaacgtcttccgctgagacaaaaccttctttcagtaatggctcggtgcggcgtaatgtatctgtggcctgtttagcggcggcacgggctttttctaccgtggcgttaaccgagtcggcaccaaactgttgcgcgtcaacgctacgctgggtgagcataatttgcttatccagtgccgcgagggaggcttcagatttcgccagattggcttcgtacgggcgcgggtcaatgcggaacagcaaatcgccctgtttgactgcctggttgtcggtgaccgccagttctacaatgcggccgctgacttccggcaccacatcaatggtatctgctgacacgtaagcgtcattagttgatggcgcactgtctacgcgccagataacgaaaacaagggcaaccagcgccaacgcaaccactaacagagcagggaatttactgcgaggagcttttttcggcgtactttccatgagcgcgtctcaaatagattagaaaaatgccagccagaacagcatggcgtagagagcaaaaagggcggtataaataattccgacaaatgccagcttgatatttgcccgctgaataactcgcctcgtgatgagcgtcaatataaggctggcaatggcgcagaaaaaccagctgggataataagcgccgatcaccgggattgccggagataatgagcatcccgaaaccatgaagacgggaattatccaggctgtttttttgagttgcatcgccatgcgagagagaactgttggcatattaaatacatcctgtctgctgcgaacaatatctgtagtgaatatcaatatccattgaatgcgtcagtatggctattttcttgatgaataaaaatagctttattcagccaccgcattcataacttatatattttatttatnaattggctgtatatatttttaaaataaatgcttttgggggcttcagcgcccccaaaagcgagtgacattaatttggggttacgatattcacccacaaatcgaaattatccagacaggcgataatttcttccagtttcgcgccattgccaataattttggctttcttcgctttcaccagatccgccatttttgcctgtccggtcagcacggcgtgcagatcttcacggctgatgtagaaagaggcgtcggcttgcggttgcagtgttttacggtagttaagcacgctatcgttcagcgtcaggttgaggttatcgccgttgctcatattgaagttcaggctgatatttttacccgcagctttcgcgctatcgaggcgaacggccataaagtcgaacagcatttcgaccgacattccgcgaatggtgtccggggaaccggtggtgccgtggctgaacttatgcaccccttcgcgcagctctttcgcgccggtcaggtagaaaccgcgccatgtggcggactcggcctgatagcccagctgttcaaagttattcgcttgcagattcttcgccacctggtcacccgggttggcggcaatcacctgtttcagtagttctgccgaccagcggtaatcaccttgcttattcgcttcttgcgccaggttgatgacacgggcagagccgcccagcgctttcacgtaacgtttgcccatctctacctgaccatacggatgcaggttagccgggttaccgtcgtaatagccaagatagaagttatacaccgcgcgggcgttgtggctgacagaaccgtaatagccacggctggcccagttattggcaagtgcaggcggcagcttaatcatgtcgccgatttcattcatggtgtagccctggttcgccaggtgcagggtctggtcgtgaatgtacgtgatagtatcgcgatatttaccaatataatcattgatatgcttattgccccagaccggccatgtgtgcggcataaacagtacttccgcgtcgttaccccacatatccagcgtttcgttcaggtactcggtccacttgctggtatcgcgggttttcgcgccgcgcagagtgtanaagttgtgcagggtatgcgtggcgttctcggcggtacacagggctttcagggccggaatatagaagtgcatttcggctggcgcttcgctaccaggggtcatcaggaagtcaaactccaggccgtcgataatcatcttctcgccagttctgacgatagttttagtcggtgcaataatgctcgggtcgcccgttgccagcgtcacgccaaggccattacccacgttgccttgcgcgttgtgcggcagtaacagaccgtaagagtagagcgcacggcggctcatgatgttacccgccagcacgttttcgctgatggcttcgtccataaagccagcaggggcaatcacctgaactttgccggatttaacatcggcttcagagataatgcctttcacgccaccatagtggtcggtgtggctgtgagtgtagataacggcaacaatcggtttttgcggacgatgctggaagtaaaggtcaagtgcggcttttgcggcaggcggcgtcaccagcgggtcgatgacaataatgcctttctccccctcaacgaacgtaatgttagagatatcctggccgcgcacctgatacattttatcggtgactttgaacaggccagaaatgccgttgatctgcgactgacgccacaggctggggtttacggtttccggcgcagcggcattaatatcaaatttgtaatcgtctgcgcggtagtaaactttaccgttcgcatcacgcagaataccttcatccagcagcggggcgataaatccacgctgggcatcgtcaaaatcctgacgatcgctaaacggtaatgatttggcgtaattctgattaacctgttgggtatattgagtggcggctttcgcttcctctttcgcgttagcggtatttaccatcatgccgctggcggcagttaacgcaataacaatcctgctcaaacggaataaccgagagttattcatataaatctccatttatcatttatgtcgtaaatatgtaatccatgcaaaatacgtcatttaaagctggcgttatcataattgggaaattgcgactttaataagtggaagtgtgagcggaacgatccattttattaggcatttgtgctgaagagggaaaagtacgacatatttattactatcatcaataatgtgacctgacttatatttttattatttanattactttcagctttcacttcgacaagaagtacgcacaatgattaatcagatgaatgatgcggagtgtaaccatgaaacccgtcntgctggtggtgnatgatgacacggctatctgcgcactgttgcaggacgtgttaagtgaacatgtctttacggtttcagtctgccataccggacaggaggccatattgcgtattgagggcgatcctgacattgcgctggtggtgctggatatgatgctacccgataccaacggcctgagggtattgcagcaaatccagaaactgcgtccgacattgccggtggtgatgttgaccggcatgggcagtgagtctgatgtggtggtcgggctggaaatgggcgcggatgattacatctgcaaaccgttcaccccgcgggtggtggtcgcacgactgaaagcggtgttgcgacgggttggcgcgctggcggttaatgacgagaaaagcgccgggctgtcattcaatggctggtatctcgataccatgcgctgccagttgcacaatccgcttcagcaacatgtcgagttaactcagggcgaatatggcttgttactggctctggcgcaaaacgcgcgtcgggtattgagccgcgagcagttgctggcgttcacccacagcgacagcgtggaggtgtttgatcgcaccatcgacgtattaatcatgcgcttacgacgcaaaatcgaactcaacccgcatcagccgatgttgattaaaactctgcgcggtctggggtatgtcttcgctgccgacgtgcattaatccgacatttctgtttgcagctcttccagcgttttcgccccgtcgatggcattggcgcataacaggcttgcccgcgcgcaggcgtgtgccagtttgatgctctcggtaagcgtccagcgttcatggcagccatataaaaatccggcacaaaatgcatcgcctgcgccgacgctgccgataatttcccgttgttctaacttttgcgaagggatccacacgccgccctgttctggggtctctccccacgccccttccgggcagtggatcaccacccgctggcgcacgcccgcatctaacagttcacgcgcggcggcagcaatatgcgcgatatgcggttcgccgttgggtaaccgaatttccagcccgctaaactccccggcctccagttcgttaattaccagataatccagatggcgcaacgcgggcagcaccagcggctgataacgcggatcgcccttacgggagaccaggtcgagtgaggtttcaaagccagtatcacgcatttgcgccagcaggcgtgcgctacgggtgccgtaaacatcgtccggcatatccaggctgtcgagcaacagtaaatagccgagatggaaaatcttcatggtgttatcgagctgatcgaacgccggaagatccaaaagtctgtttgcacccggcgaatggaaaaacgtccgctgcccgcttgggtctgtcatcacctgcgacatcgacgtcggggcaaaggtagtgcgctgcacatgctgacgattgacgtgatattgctcaagcatcgccatgatgtaatcgccgtcgctgtcctgaccgattagcccaaccgcctgtaacggcagcccggtgcgcattttcgccagcgtcagcaggacgttaagnnnngcaccgccggtggagcgttcgctgtgggtgatctccgccagccagccgcgctctggccactggataatctgatggacgtggtcaaccaacatattgcctgcggcgataatccctttacgctccatcatgcctgccccgcactgccaaaaatacgcatctgttgtgcaaccgtatcgctgatggcggcttccactgccagcagtaactcggcaaactcgtcatacatcggctgacggtgcgccattcgggcctcaacggcagccagcgccgcttgcgacatgccagtgtagaaattgattttgtggatacccagttcgatggcgcggcggaaatcggcatcgctaatccctgagccgccgtgtaataccagcgggatagcagcctgctggcggatagcgtcgaggcgcgggaaatcgagtttcggttcgccgcgatatttgccgtgtgcattgccaatcgccacggccagcgcgtcaatgccggtacggtcgacaaaatcacgcgccagttgcggatcggtaaacagggattcatcggcatgaccatagagtgcaccgcnttcgtcgccacccaccgcgcccagttcagcttctaccgatacgccaacggcatggcacattttcaccacttcccgcgtctggcggacattttcttcataccccagcgtggagccatcaaacattaccgagctgaatcccagccgcaacgcttgcaccaccgattcaaaatgcagtccgtgatcgagatttaacaccaccggaatgtcatgacgcgccgcttcaaatttcactgtctcgaccagggaatccagcgagatatatttaaaatgtacttcggcaatgttgataataaagggcgaacgttcttgtctggcagcagcaaacaaggcgcgtaaaaagtgcgagtccagcacattaaacgcacctaacgaatagtgatgttcgcgggcatgtgccagcccttcagcgagagaaatcaatggcataacgttatccttattcagcggaactggcggtattcgttacacaataccaactgtgcaggttcgtcttcgtcaatcaggttgtagcggtccagtggctgtaaaaagtggttatcgtggtcgtcgtcattaacagaagagacttcgccaaccagcacatcgccaaaaccggcttctgcccaaaagctgtgatacaggccgggcggcaggcagatactttcgccgggagacaggcgcaactgagagcctgcagtatgtttctggcggcagccgtctatcaccaccgtaatgtcactatcagccgtttgctcgttactatcggcattccacagttcaacaattaaattaccgccgccgcgattgataatgtcctcacgcttacgccagtgaaaatgcattggcgtgacctgcgcatcgcgcacatgcatgatcttctcggcgtaacatttcacatacggcattccttttgctgagccgttacgtagggtaaacagcgtcagcccgtgtgctgcaaagttgttgcgaccaaaagcggtaacatcccagccgagtttaagatcaaaaacctcctcccacgcggcggtgtcgagctgctgccattgagcaggcgagaaactggcaaagggcggcagatgtacgtcatgttgcgaaaagaattgccgtgtatggccgagaatgtcgtttatagcggagcgtttcatcgaaagcgttctccttagcggtgaccgggcagctgcgnnnnccggcgtgtggacttatttcaccgtccagcctttgtaattgccgacgttgtttttatcgatcatcgtcaccgggatcagcaccggctctttcggcgcaggt

SEQ ID NO: 1664 - DNA, 8267 bp, Escherichia coli
  Strain O55:H7
  modified_base (1246)..(1246): a, c, g or t
  modified_base (1421)..(1421): a, c, g or t
  modified_base (2064)..(2067): a, c, g or t
  modified_base (2344)..(2344): a, c, g or t
  modified_base (2843)..(2843): a, c, g or t
  modified_base (3055)..(3056): a, c, g or t
  modified_base (3334)..(3334): a, c, g or t
  modified_base (3508)..(3508): a, c, g or t
  modified_base (3803)..(3806): a, c, g or t
  modified_base (4358)..(4361): a, c, g or t
  modified_base (4517)..(4520): a, c, g or t
  modified_base (6167)..(6167): a, c, g or t
  modified_base (6169)..(6169): a, c, g or t
  modified_base (6189)..(6189): a, c, g or t
  modified_base (6193)..(6193): a, c, g or t
  modified_base (7384)..(7387): a, c, g or t
  modified_base (7579)..(7579): a, c, g or t
  modified_base (7767)..(7768): a, c, g or t
ctgcaaaatgtcgtagccaatttccaccgctttcgctgccatcacctggggatcttgcgccggagtagcgacaaacaacgagttctcacgcttgagcgcctcttcggcgtccgggcttccgtccacaccgacaataaagaactcgttacgttgtgcctgttttgctgccagatcggcaccgattgcggtgggatcgttaatcgcaaatacgccgtcgatcttcggatttgccgccagcagtcccgtcattacctccagcccgccttcacgactgcctttcgcgttctggttgtcagagagcactttgatgtcaggatggcgtttaaattcagtctggcatccttcgacgcggttttgcacggcggataccggcgggccgttgatgatcaccacgttgcctttgcctttcaggcgatcggtgatgtatttacaggccatttcgcctgcctgggtgttatcggaagtgatggtggcatcggcaccttctgccgctacgtcaaccgcgacgaccacgatcccggcatctttcgcccgtttcaccgccgggccgatcccttttgaatcggcagcgttgaggataatcatatcgacgttagcggcgataaagttgtctatctgcgacacctgctgacccagatcgtagccgctggaaaccagcgtcactttgacgttatcgcctgccagtttgcgtgcttccagctccgcgcctttggtgatctgcacgaagaacgggttcgccagatcgcccaccgttacgcctattgatttcagttctttcgcctgggcgaacggtgctgcggccagcagcgcgcctgcacagagcgcggtcactaagggcttcaatctcatgctgtattcctcatgtgtttatgcactttgatggtgtcgggtacggtatttgtcgatcagcaccgcaatgatgatcaccgcccctttgatcaccagttgccagaagtaagagacgcccattaaggtcatgccattgttgagcgtggcgataattagcgcgccgaccagcgtgccggtgatggtgccgatgccgccgacaaaactggtgccgccgaggatcaccgctgcaatggcatccagttcgtaacccatgcctaagttgccgttggcgctgtacagccgtgaggcgctcataatcccaccaagcccagaaagcaggccgctcatgccataaacaaacagcagcaccagccagaccttaatgccggtaagacgcgccgcctgcatattgccgccnacggcgtagatatgaacgccaagcgtggtgcggcgcagaataaaccagcacaccacgatcaccgccagcgcaatcaccaccagccatgggaccggcccgagatagttgttgcctatccactcgaaattaatgttggagttgataaccgtggtgccgtccgccagcagatacgccnccccgcgcagcgccgtataggtgccaagcgtaacgataaacggtggcaatccggcaaaggccaccagcgcgccgttgaacagccccagcagcaggccgagcatcagcgctgccgggatcgacagcatggcgaactcagggctaagggagacgaccatcgccgccaccgctgtggtgccgaggatcgaacccacggaaagatcgatcccgccggtcaaaatgatgaaggtcatccccgccgccagaacaatgttgatcgatgcctggcgggtaatattcagcaggttgctttcggtaaaaaagtttggcgtgataaagccaaataccgccacgatcagaatcaaaatgggcaagatgccgaccgtttgcatcagatcgctcatcagcatttttttggcagaggtttttgcagaggtcgtcatgaggttaccgcctgggaatgggcgtcgttgacgccagtcgctaaggtcataatgttttcctgggtgatgtttttgccgtttaactcaccggcaatgctgccttcgcgcatcacatagacgcgatcgctcattcccactatctccggcagttcgctggagatcatcaggatcgccacgcccttgcgcgccatctcgttcatgatccggtagatctcacttttnnnnccaacgtccacgccgcgggtgggttcatcgagcagtaaaatgcgcgggccaatcgccacccagcgggagatcaacagtttttgctgattgccgccggaaagcccgcccgcgcgtacctgggcatgaggcacgcgaatgttgagcaacttaatggcgtcatcggaaatggtttgcgcttttttgcgattgagcattccccagcgggcatcgcgctccagggttgccatggtgatgttttcggctgctgccatttcaaggaataagccttgttctttgnggttttcggtgagaaaaccaatgccaagatcgatggcttcgcgcggggagtggatcaccaccggttcaccatcgacttcaatcattccgcctgtcgctttccgcacgccgaagatcaactgcgccagttcggaacgtccggcacccaccagtccggcgaggccaacaatttcgccggaacgcaccagcaggctactcggctggactttgccgccgtcggtcaggtggtgaacattcaggcgggctttaccgagcgggatatcgcgctctttattgaacagatcgctcagtggcctgccgaccatcatccgcaccagctccccggcattgaggttatcgcgggtcaggctgccaacgtattgcccgtcgcgcagcacgctgacgcgatcggaaagctcatacacttccgccatgcggtggctaatgtagataatcgccatcccttcatcgcgcagccgcataatcagttcaaacaggcggtgagtttcgcgggaggaganggcagcggtgggttcgtccatcaccagaatgcggctgttgcgatgtagtgcgcgggcgatttcgacctgctgttgctcggcaatggtcagcgtcatgaccttatcgctggcgttaaactgcgcgccgaggcggtcgatcactttttgcgcctgcactagcatctctttacgctgcaccagcccgccgtgggaaagctcgctgccgagaaaannattttctgccaccgacagattcggtgccagctgcatctcctgataaatcagcgtaataccggcgcttaaggcatcttttggcgtgcgaatgtgaaagggcttgccgtctatgagaatctcgccgctggtggcggtatacgcccccgccagcaccttcatcagcgtgctttttcccgcgccgttttcccccatcagggcatggatctcgccagggtagaccgtcaaatccacccctttgagtgcataaaatttgccgaaggctttggcaatattgcgcntctccagaactggcgtgctgttcatggtggactcctgcgaggttgtcgatatcagcactccatcacaggaaagtaaatgcaaaatgtcagaagccgttcatatttgtcatattgcgatttttcttcacggagcgtgatatggcgcaccccggacgtcacttttttgccagcgcncgcgggcgattgctgcttttgaatttgctggtggtggcggtgacgttgatggtcagcggcgtggcggtaatgggctttcgtcatgccagccagatgcaggagctggtgcagcagcaaacggtggatgatatgaccggcagcctgaatctggcgcgcgacacggcaaacgtggcaacggcggcggtgcgattgtcgcaggtggtgggagcgctggaatataaaggcgaagccgagcggttgcaggagacacagcgggcattaaaaagctcgcttgcacaactggcgaacgcgcctnnnncgcagcaggaagccgggctggtgacgcgaatcatcacgcgtagcaacgaactgcaaaccagcgtcggcggtatgctggagcgcgggcaaaggcggcatctggagcgcaacgcgctgttaagttcgctgtatcaaaacttaagttatctgcggcatctgcaaaaagtcactcacgcgcaagatgatattttgcttaacgagatgaaccgactgattgttgccgctattgccacccccgcgccgcaggcgattattcatcaactggtcggggtaatgtctgcgttgccgacccacagcgatacgccattggttaatacgttactcaatgatttcaatgatgaaatgcgtaaactcgcgccgctttctgccgctctggagcaaagcgatctggcaatcagctggtatatgtttcacatcaaagcgctggtggcgatcctcaatggcgacatcaaccgttacgccgaacaggtggcgacgctctccggtcagcgtgtggcgcaaagttaccaggatttgcgctccggcgagagggtgatcatgattttcgccctgnnnnggtggtgatcaccgcgtttgccggctggtatatctatcgcaacctcggcactaacctgacggcgatttcccgcgccatgagccgcctggcgcacggcgaagcggacgtcacttttccggcgttacagcggcgtgatgagttgggtgaactggcgcnnnnctttaacgtttttgcccgcaataccgcgtcactcgaacgaacctcacggctgctaaaagagaagaccacgcagatggagattgcccaaactgagcggcaggggttggaagaggcgctattacacagccagaaactgaaagctgtcgggcaactgacgggcgggctggcccatgattttaataatctgctggcggtgattattggcagcctggagctggtgaatccggactcgccagacgcgccgcgaatacagcgggcgctgcaagctgccgaacgtggggcgctactgacacaacgactgctggcgttttcccgcaagcagtccttacatccgcaagccgttgaactgaaaacattgctggaagagttaagcgaattaatgcgccactccttaccggcaacgctggcgctggagattgaagcgcagtctccggcgtggcccgcgtggattgacatcagccaactggaaaatgccatcatcaacctggtgatgaacgcccgtgacgcgatggaagggcagacgggaatcatcaaaattcgtacctggaatcagcgcgttactcgcagcagtgggcagcgtcaggacatggtggcactggaggtcatcgatcatggcagcggtatgtcgcaggcggtgaaaagccaggtatttgagccattctttaccaccaaacagacgggcagcggcagcgggctgggtttgtcgatggtctatggttttgtgcgccagtccggtgggcgcgttgaaattgaaagcgcgccggggcaggggacaacggtcagattacagcttccccgcgcgctgacggcggcgaaaaacctatcgccagcggcagtagaacaggcttctgtcagcggcgataaactggtgttagtgctggaagatgaagccgcggtgcgccagaccatctgcgaacagttgcacctgctgggctatttgacgctggaagcaagcagcggcgaacaggcgctggatctgctggcggcatcagcagaaatcgatatttttatcagcgatttaatgctccccggcggcatgagcggcgcagaagtggtcaatgcggcccgcaaactttacccgcacctgacgctgctactcatcagcggtcaggatttacgccccagccataaccccgcgctgccagacgtggcgctgttgcgcaaaccctttacccgtgcgcagttggcgcaggcgctggggcaagagaattgagaatcctcctctactcgtaacaggcacctttgcctaccttgtattaactttgttgcgaggccgagtttatgaaacgccactccacgctttttcttttcaccctgctcacgctgaccaccgtaccggcccaggccgatattatcgatgacaccattggcaatattcagcaggcgattaacgacgcttataaccctgaccgtgggctagattatgaagattcgcgcgacgacggctggcagcgtgaagtgagcgacgatcggcgcagacaatatgacgaccgccgtcgccagtttgaagatcgtcgcaggcagctggacgatcgccagcaccagcttaatcaggagcgtcggcagctagaagatgaagagcggagaatggaagatgagtatgggcaatgatgttgggtatggggcaggcatcgcccctctggggananggttagggtgagggggccancacncacattccctctcatcacgccaccccaatctccatcccatcaaaccccgcctcaaaccccgacggcagtgcgttttccatcagccacgcatcaaactggtggctgatatgggtcagaaccacgcgcggcgagcggataacctgattcagcgcaagcacggtatttaaatcacagtgattacgcggtgcatcctcgcgcggcgggtggctgcaatcaatcaccattacctgcggctgattattgcgtaaaaatttcagcgttttttccggcaagccagcggtgtcagacagccacgccacccggctgtgcgccgtttccagcagataaccgaaggtcagttttgagtggttgagcggcaggggtgtgacctgtaacccctgcaaatcaaacaccacaaacggttccaccgtgtggctgaaatcaagcaggcccggatgtttaaacagatcgtcgcagccctgttcatccggtgggccgtaaaccgggatcggatcgcccacgccccagcgcagcgggaatagcccctgcacgtgatccatatggtagtgcgtcagcaaaaactgctggaacgatccgggcgaccagcgatcggcgagatcgtgccgcccggcgtcgatcagggtgatcgcctcgttaaacttcactacgccgctgcatggctggcggcgatagtgcggcgagcgccgcgctctggcgcaggccgcacactcgcagccccatgccggaacgccctgtgcgccgccggagccggtgagcgtgagggtcaggctcatgttacagcaccttggtgaagcggaagtggctctgctcgtagccttcgcgcagatagaaacggtgcgcgtcgtggcgcttcacgttggtcgaaagttcggtcatttcggccccggcctggcgggcttcttcttctgcccacgccagtaacttactgccgacgttcagaccgcgcgcctgcggcattaccaccaactcctgaatttcgccgatccagttgacatgatgcagatgaaactgcaaatgcaggccgatcataccgacaacttcgccatccagcagcgccagatggtagcgcatgttcgggtcgcgcaggttggcgttaaagcccacgcgaaacgcgtggtggtcaaactccgcctgttttagctcgcaaatcaacgcgtaaaccgcgtcggtgtcgtactgcgtggccgggtnnnngctcacaagcaggcatggtgtttctccttctgatggattagcgtcagcagcgtgtcgaccgactggcgcaggctgccgtcattattgagcgtatggcaatcctgtggagtatagcgggcggcgcgcgccagccgggcgttaatttcactggcgttttcgcggccacggttttccaggcgctggcgcaggatntctggcgaaacctgtaagcaaatgggcagcagcgccgattgatagcgcgcccgcgcctgcggcagatgggcgcgtgagccgttgaccagcacgtcgaatccagcgtgcagccagaggtcaatctcgacgccgacgccataatacagaccgttagcgtgccagcttaaggccagcagattttgccccgnncgggtaaaaaattcctgctcgctcagggcgatatggttttcgcttccggcgctggcgtcgcgcgtgatgtagcgatgcgccaccagtagctgagtttgttcccgcaggcggagttccgccagcaggctatctttcccggagccggacggccccattaaccaaatcagttttcccatcatcagaacacccttttaccctgacgccagacgtggtcgatatgaatgtgattgcccttgcgatgcgccagcaccaggtcggcgcgtttgccctcgccaatcaccccgcgatcctggagattaagcgcctgcgccggatttttggtcaccagcttcaccgcctgcggcagcgtaaagcggttgctctggtcatcggcgacgcggaacgccgcatccagcaggctggcggggtagtagtcggaagagaggatatccagcaggccaagctgtgccagttcactggccgccacgttgccggagtgcgaaccgccacgcacgatatt

SEQ ID NO: 1665 - DNA, 2194 bp, Escherichia coli
  Strain O55:H7
  modified_base (149)..(150): a, c, g or t
cgcccatcagcacgttcatgccatgcttgcgcgaggcttccgctgcttcaaacgtggtgggaaattcggcgatcacgctgccaagctggtgagattcggcaacgtgggcgtgcgttgcgtcatcgtggctggcgagcgcaatttgtcgnncgcggcacattgcggcgatggattcgcgattcggctgcgaccagcgtgcggcaagcgccagctgttcctcttcatactgctgcatctgcgcatcggtgagcgagtatttgccctgataatattcgcgatacttctcgcggttggcgaactggcgctggcccggcgagtgatccatcagcgacaccagcgtcaccggctcgcgctgcaccagcttttcaaacagcggcagcgtggtgtgatgcggcagctcgcagcgcaggtgcaggcggtgctcggcgcggttgacgccgcgtttctgcgtctcttcgatggcgttgatcatcttctccagattctccagccgatcgccgccgtctcgcacgtcgccaatcgccacggcgtccagtacggtggtgatgccgctcgccaccatcagcgcgtcatggctgctcatcgccgagtgggcgggccagtcaactttcgggcgcggggtgaagaatttatcgaggttgtctgtatgcagctcaatcagccccggcagcagccagccgccttcgccgtccatcgcctccggcaggcggctctggctttcggcaaaggcgcggatttcgccgtcctgcatctccagcgaaccgtttaccacttcgttttccagcaccagtttgacgttattgataatcatgaagaggctcccattgggtgcaggcggtcggcgacgtcattacgtacggcttcgtcatggaaaatgccgacgatggctgcgccgcgggctttggcttctcggatcagttcgactacggcggcgctgtttttggcgtccagcgaggcggtaggttcgtcgagcagcagaatggggtagtcgacgataaagccacgggcgatgttgacgcgctgctgttcgccgccggagaaggtcgatggcgcaaggcgccacaggcgttccggcacgttcagacgggtgagcagacgcgcggctttagcggcgcaggcttcacgcggtacgccggtatcgagcagcggctgcattactacttccagcgccgaaatgcgcgggataacgcgcagaaactggctcacccagccaacggtggttttgcggatttccaccactttgcgcgctggcgcagtgaccaggtctacccactcgtcaccgtgtttgatctggatttgcccttcatcgggcagatagttggcgtacagcgagcgcagcagggttgatttgccgctgccggagtggccgtggagcaccacgcattcgcccgcgttgacggtgagcgaggcgcggttgaggacgggcaagcgcacgccgttttgctggtgcaggatgaaggttttactgacgttttgtacgttaatcatttttcgcctcgtggttcgggtgtcggatgcgacgctgatgcgtcttatccgacctacggggagcgcatttgtaggccggataaggcgtttacgccgcatccggcaccggctcaattctgcaaaaccgatgacaccagcagctgtgtatacggatgatgcgggtcgtcgagcacgcggtcggttaacccactctccaccacttgcccctgcttcatcaccagcaaacggtccgccagcaggcgggcgacgcctaaatcgtgggtgacaatcactaccgcgaggttcagctccaccaccaggccgcgcagcaggtcgagcaggcgggcctgcaccgacacatccagcccgccggtcggttcatccataaacaccagcttcggatgcgtcaccaggttgcgggcaatctgcaaacgctgctgcataccgccggaaaaggtggtcggcaggtcgtcgatccggttggcgggaatttccacctcttccagccacttctgcgcggtggcgcgaatatcgccgtaatgacgcgccccggtcgccatcagccgctcgccgatattgccgcctgccgagacctggcggcgcaggccgtcgagcggatgctgatgcactacgccccattcggtgcgcagcaggcgacggcggtcggcctcgctcatgccatagagggaacggttttcatagtgaatctccccctgctgcggcgtca

SEQ ID NO: 1666 - DNA, 7256 bp, Escherichia coli
  Strain O55:H7
  modified_base (2)..(3): a, c, g or t
  modified_base (7)..(8): a, c, g or t
  modified_base (380)..(380): a, c, g or t
  modified_base (877)..(877): a, c, g or t
  modified_base (7246)..(7247): a, c, g or t
gnnattnntttcagcagcgtggtcttcccggagccggattccccgacaatgcccagcacttcccccggccataaatcaaaagagacatcgctaaagcctttgcccggcgcgtaaaggtgggtcaggttattgaccgaaagtaacggttgattcattggctttttgcctcgctctgttggcggcaataatcggtatcggagcagacaaacatgcggtttccggcgtcatccagcaccacttcatcaagatagctgtgggtcgatccgcagatggcgcatggctcatcccactgctgaacggtgaacgggtgatcgtcgaaatcgaggctttccaagcgggtaaacggcggcaccgcatagatgcgcttctcacgcccggcnccgaagagttgcagggcgggcatcatgtccattttcgggttatcgaatttcgggatcggcgacgggtccattacgtagcgcccgttcaccttcaccggataggcgtaggtggtggcgatatgaccgaagcgggcgatatcttcatacagcttcacctgcatcacgccgtactcctccagcgcgtgcatggtgcgggtttccgtttcgcgcggctcgataaagcgcagcggttcggggatcggcacctggaaaataatgatctgatcttcggtcagcggcgtttcggggatgcggtgacgcgtctggatgaccgttgcatcgtccgtgcgctcggtggtgtttaccccggtcacgcgcttaaagaagttgcgaatcgacacggcgttggtggtgtcatccgcgccctggtcaatcaccttcagcacgtcgctttcgccaatcacgctggcggtaagctgaatgccgccggttccccagccgtacggcattggcatctngcgcccgccaaacggcacctgataaccggggatcgccaccgcttttaagatggcgcggcggatcatgcgtttggtctgctcgtcgaggtaggcaaagttgtagccgctcagattagccatggttctgctcctgttgcagacgtttgagtagctccagttcggcctggaaatcgacgtagtgcgggagtttgaggtgcgagacaaagcctgcggcttcgacgttgtcggcatgtgccagcacgaactcttcatcctgcgccgggcctgtcgcgtgctcgccgtactccggggcttgcagagcgcggtcgaccagcgccatcgccatcgctttgcgctcgctcatgccgaacaccagcccgtagccgcgcgtgaagtgcggagattcatccggtgggtcgataaaaccgttgaccatttcacactcagtcatcagcagttcgccgacgttcaccgcaaatcccagctcttcgggcacaatcgacacgtcgatgtaaccactgcggatttcacccgcgaacgggtgattgcgcccgtaaccgcgttgggtggagtaggccagcgccagcaaatagccttcgtcgccgcgcatgagctgttgcaggcgggaagaacgtgagcaggggtaaaccggtggcgtgcgggtgatgtcatccggctgtgcgccgctatcctcttcaaacttcgccagcccctgacgcgccagcaggctgaaaacgtgcggcgacggctgctgttcgctgtcggcggtggtcagcgtcggcgcttcgccgtttgccagcagggtgaaatcgagcaggcgatgggtgtagtcgtaggttgggccaagcagctggccgccgggaatatctttataaaccgctgaaatacgccgttcgagacgcatctccgtggtgtcgagcggctcgcttaccgcgagcttcgccagcgtggtgcggtaggcgcgcagcaggaaaattgcttcgacgttatcgccgctggcctgtttcagcgccagcgccgccagctcgcggtcggcaatgccgccttcggtcatcacgcgatccaccgcaagattaagctgctgttcaatctgggcgacgctcagttcaggcaaatcggtatcgccccggcgtcggctctcttgcagggcgtgggcggcgtcgatcgccttctcgccccctttcacggcaacgtacatcagcacacctccacatgagtggttcgcggaacagccagcaggcgctcgccgcaggtcaggatcaggtcgatgccgagcgggaacgggtgcgggcgctcggtgagttcgtgcagaatgcactccggcagctgcggggcgatcattcgttcttcggcaatacccgcgccggtgagacgcagcatgcgcccgccgctcaggctggcgacctgtaaaatcagcgttgcgcccgcttccggcgcaacggcggtgccggtggaaagggcgttaagctgttcgctggaaatcgcctcatccgttaccgcgaaggtcgcctgttccggctggctgaccagcggcgcgttggtatgaaaacgcaggctctggctgacgatatcgttgctcaatggcgcggcaagccacaccggcgtgtcgttatcggccagcgtcagcagcacgctggtggtggcgatattcagcggctgccagccgcgtttgagctgatgcagggcgacaatcacgcccggctcgctcatggcctttaacaggcgacgaaaactgtgctgggcatcctgcacgggaagcataaaagcggtttccagggtcatgcgttgtctccgcgaaccatcgtaaagaagtcgacccggctggcgttcacttcggcctggcgtgcggcaatgcgtgccatacggtcagcgtccagcggggcaataagcgtttctgataagttttgaaaatggcgggtttgctgcatcagcgcgtcaatcagcgcgcagcgttcggcgtgctgtttgtcgcgccccagcacccagctgtagccgagggtgccgtcagtcagacgtacggcggcgcgggtcagcgtggcgtcgccggcaaaaaagcgttcgccggtgccgcccatccgcgcctgaatctgtaccaggccagtttcagcggcgcggatcacctcatagttggcggtgatgttcagcgcgttcaggcgggctgccagttctgccggttggctgtgtgccagtacggacatccagtgctggcgggtcgcggtatctgcgtgcattcagtgctccatagtgaattcaatcatgtcggcgcgcgtcaggctgacggagtactccgccgggctgctttcaccgtcacggtggttaagggtgcgcacgcacagcagcggggacatattcggaatttcaagacgctggcactctttggcctgggcgcggcgggcgctgatccgcgtctggctgcggcgcagtgcaatccccgtttgctcgcgcagaaaatcgtgcagcgagccgctgtcgaagcgttgcagcgtcggccagagggtgaggtccgcgaagtagtggtcgattaaacagagcgcgatgccgttgacccggcgcagggtgcgcagatggatgacgttctccccctcggttatccccagcgcgtcagcgacgtgaccggaggccgggcgcagcacagacagcagtttttcgctggtgggatggctgccctgatccagcagattctggctaaaacgcgcctgggcgttgagcgggtaatcgaacgggcgcatcagcaccagcacgccgacgccctgacggcgctgtacccagcctttttccaccagttggtcgatggcgcggcgcagggtgtggcgatttacctcaaagcgcgccgccagctgctgctcggcgggaagatagtcgccgcagcggtagtgttgacgaagctcctgctcaagttttgcggctatctcctgatagcgtgttgggtagctggtcggatgtgtagacaagtgcatagctatcaatgcctcgctaatcagataaagtgcttacgcaaccgttgagagaggaaatccagcaggctgaccgtgacgataatcagcaccatcagggcgcaggtttgctggaactggaaaccgcgaatcgcttcccacagcgtgacgccgatcccgcccgcgccgaccatgccgacgacggtcgccgagcggacgttggattcgaagcgatagagggagtaggagatcagcagcggcatcacctgcggcagcacgccgtagaggatctcttcgagcttgttggcgccggtggcgcgaatgccttccaccgggccgggttcaatcgcttccaccgcttcggaaagcagtttggagagcacaccggtggtgtggataaacagcgccagcacaccagcgaatgggccgaggccgacggcgaccacgaacagcatggcgaagaccatttcgttaatggcgcggcaggcgtccatcaggcggcgcacgggctggtaaacccaccacggcaccaggttttcggcgctcatcaggccgaaggggatggagagaaccaccgccagcgcggtgccccagacggcgatttgcagcgtgacgagcatttcggtgaggtaatcctgccactggctgaaatcgggcgggaagaagtcggcggcgaaggtcgccatgttgccgccgtctttgatcagcgtgagcggggccatttccgcgccctgccacgagacgaccaacacggcgagtacaacggcccagctcagaagcgagaaccagctgcgcttgggtggggcgatggtgatggtttgcatgtttggctccggtctgtaggccggataaggtgcttgcaccgcatccggcatcaacgcctgcacattgtcggatgcgacaccggggcgtcttatccgacctacgatttactgcatcgctttacttaccgaactcatcgcgcttaacgcgttgttcaggcggtccaggtcatccagctgcgcttgaatctcggtggtttttgccagcttgtcctgctcattcagccctttattgcctttcacgctttgcatctctttaaacagtgcgagctggcgaatcggcaccagttgcaggtcgctggaggcgcggaacggcgcccagcccaggcgttccagcaccgctttctcttccggcgtcttgccgtaattcataaagaagtcgtagatcttgtctttggtggtttcggaaaggtttttacgccagacgatcggatcgcctgggatcagcggtgacttccagatcactttcagttctttcagcttctccggcgcggaggttttcagcttgtcgaggttttcggtgttgttggtcgccacatccacctgcttgttggcgacggccagcgcgttggtttcatgcccggcgttgacggtgcgcttgaagtcactggcggagatattgtttttggagaagacgtagtagccggggacgaggaagccagaggtggagttaggagcgccattaccgaaggtgagatctttccgcttcgccagcagatcgttcaggttgttgatcaggctgtctttgttgacgatcaacacgctccagtaacccggcgatccatccgccgcgacggtctgagcgaagacctggccgttggcgcgatccactgcttccatcgccgacaggttgccgtaccaggcgatatccactttgttgaaacgcattccctggataatgcccgcatagtccggggcaaagaaggcgttgaccttcacgcccagcttcttctccatatcctgtaaaaacggcgtccattgcggtttcaggttttgctgtgattccgttgaaataatgccgaaattcagcgccttttcctgctcttcggcgtgtgccgggcttaacagggtgctgaggctgaacatgctggtgaaggccagcgaggcaattatcttagcgttcattcgttttcctcaatgatggggatgtcaggcagctttcgcgttctcttcgacgcggttgatgctgcggtagagatggtcaaaacgttcgttatcaaactgttggctgctgccgtcgtagaagacgtgcccctggcgcagggcgacgatgcgttcgcagtagcgcagggcgtaatccacctgatgcagcgtgacgaccacggtgatgccgtcgttctggttgatgtcgcgcagggtgtccatcacgatgcgcgccgattccgggtccagcgaggcgatcggttcgtcagcgagaatcactttcgcctgctgcatcagcgcgcgggcaatcgccacacgctgctgctggccgccggagagcgtggaaacacgctgatacgcaaagtgcgccataccgacgcgggtcagcgcctgtaatgcgcgctgtttctgctcgcgggtgaaccaactaaaacaggtgcgccagaacggcgtgctgccgagcgcgccaatcagcacgttctccagtacgctcaggcgattcaccaggttgaattgttggaagatgtagccggtgttggcgcggcttttgcggatatcgcgggccaggcggccttcgcgctggacagtgcggcccagcagctcgatatggctaccggcggatttatcgccggtaatcaaaccgcttaagtgacgtaaaagggtggatttgccggaaccggacggcccaagcagagccaccatttcaccatgatggatattcagatcaaccgcgtgcagcgcctgatgctggttgaaggttttgctcagttgttcgacgcagataatcgtttgcatgatgcagcctccctaaaaaagtggctccatcgtggcggattattgtgacgatttggttaattaaaagtgactaacagatgaagagttaacgggaattcgatgacagtgcgggagggcgggcctcccggcggattattgcgttggttgttgtttgacgacattaatcatccacggtacgccaaatttatcggtgactttgccaaagccatgcgcccagaaagtttcctgccaggccatttcgatttttccgttagcggcaaggttatcaaaccagcgttttccttcttcgacctgttgcgaatcgagcaccagcgtaaaaccggagtagctggcttttcctgacggtatagcatcgctcatcatgatatcgcttccggcaatgcgcacattggcgtgggcgatggcggtatcgggaaattgcattccggaagggcagttctcggcgctgtcctgcgctgattttggcatttcgccgaagctgattttatagagcagttcagcgcccaacgtacgttgataataggcaatcgcgtcggagcagttaccggcaaaagagaggtagggacttaacggcatgatggtgacctcagttaagagaagccagttaagtgtagttcgaaatttatacagatgagagggaagcctgataagacgcgcgagcgtcgcatcaggcagtcggcactgttgccggatgcggnntaaacgcct

SEQ ID NO: 1667 - DNA, 28 bp, Escherichia coli
  Strain O55:H7
  modified_base (4)..(5): a, c, g or t
  modified_base (19)..(20): a, c, g or t
cctnntaagacgcgcgagnntcgcatca

SEQ ID NO: 1668 - DNA, 11716 bp, Escherichia coli
  Strain O55:H7
  modified_base (4)..(5): a, c, g or t
  modified_base (7)..(10): a, c, g or t
  modified_base (5324)..(5324): a, c, g or t
ctgnngnnnnatgcggcgtaaacgccttatccggcttaccgatcacaatacaatcagttctttttcacaaactcagatttcagtttcatcggaccaaaaccgtcgattttgcaatcgatgttatggtcgccttcaaccaggcggatgtttttcactttggtgccaattttcagcatcgaagagctacctttcaccttcagatctttaatgatggtaacgctgtcgccgtcagccagcagattgccgttagcatctttaacgatcagctcgtcgctttcctgtgcaggttctgcgtcgttccattcgtaggcacattccgggcagatgtacatgccgttatcttcgtaagtgtattcggagttgcattttgggcagtgtggtaatgacatgtggatttcctcaaaagtcagcagggcaaaagcgccaaaaaacggcagattgccgaaaaaggccgcaattatacacaaaatccctgagtttgtcgggggtactgctgattttagacgacgatcgttttcatttgaaaggaaacgcaaaaagaaaataatctttttgcctccatttattatttaagataaggttaatgctctacttgttcttttttttattcacatgatatttttatctttctgacgttttaaacgtatcggaagatgttatttattctaataaaaaacaacactctaaatataaaattatttcttgcagtaattataaaagccgaaaacagaactcaaaaacaatctggctaaataaaagtaataaaatttgctttaaggaagaattttctatgtacacacagaccctgtatgagttaagtcaggaggctgaacggctgttacagctttctcgccaacagttgcagttactggaaaaaatgcctctctctgtacccggagacgatgcgccacaactggctttaccctggagtcagcctaatatcgccgagcgtcacgcgatgctgaataatgagttgcgtaaaatttcccgactggaaatggtgctggcgattgtcggtaccatgaaagcagggaaatcaaccaccattaatgccattgttggtacggaggtactgcctaatcgcaatcgcccaatgactgcgctgccgacgcttattcgccatacgcccggccaaaaggaaccggtactgcatttttcacatgtcgcgccaatcgattgtttaattcaaaaattacaacagcgcctgcgtgattgcgatattaagcatctgaccgatgtgctggaaatagataaagatatgcgtgcgcttatgcagcggatcgaaaatggcgtcgctttcgaaaaatattatctgggtgcccagcctatttttcattgtctgaaaagtttgaatgatttggtgcgactggcgaaggcgctggacgtcgattttcctttttctgcttacgccgccattgagcatattcccgtgattgaagtggagtttgtccatctggcggggctggaaagttatcccggtcaattgacgttactggatacccccgggccaaatgaagccgggcaaccgcatctgcaaaaaatgcttaaccagcagctggcacgcgcctcggcggtactggcggtgctggattatacgcaactgaaatcgatctccgatgaagaggtccgtgaggcgattttggcggtggggcaatcggtgccgctgtatgtgctggtcaataagttcgatcaacaggatcgtaacagtgacgacgccgaccaggtgcgggcactgatttccgggacgctgatgaaaggctgtattacgccacagcagatatttccggtgtcgtcgatgtggggctacctggcaaatcgggcgcgccatgagttagccaacaacggtaagttaccaccgccagagcaacaacgctgggtggaagattttgcccatgccgcgctcggcaggcgctggcgtcatgccgatctggcggacctcgaacatattcgtcatgctgccgatcagttgtgggaagattcgctgttcgcccagccaattcagatgttgcttcatgccgcttacgctaacgcctcgttgtatgctctgcgatctgccgcgcataaactgttgaattacgcgcagcaggcgcgggaatacctggattttcgtgcgcacgggttaaacgtcgcttgtgaacaattgcggcaaaatatccaccagatcgaagaaagtttgcagctattgcaactcaatcaggcgcaggtgagcggcgagattaaacatgaaatcgagctggccctgacctccgccaaccactttctgcgtcaacagcaagatgcgctgaaggtgcagttagccgccttgtttcaggatgattcggagccgttaagcgagattcgtacccgctgtgagacactgttacagacggcgcagaacaccatcagtcgcgactttacgctgcgttttgccgagcttgaatccaccctttgccgggtgttaaccgatgttattcgccccattgagcaacaagtcaaaatggaattgagcgagtcagggtttcgtcctgggtttcattttcctgtttttcacggcgtagttccccacttcaacactcgccagctgttcagtgaagtcatttcgcgccaggaagcaacggacgagcagagcacgcgattaggcgttgtgcgtgagactttttcgcgctggttgaatcagcctgactggggacggggaaatgagaaatccccgacagaaacggttgattacagtgtgttgcaacgagcattaagcgcagaagtcgatctttattgccaacaaatggctaaagttctggcagagcaggtcgatgaatctgttacggcaggcatgaatacttttttcgctgagttcgcttcatgtttgacggaattacagacgcgtttacgcgaaagtctggctctgcgtcaacaaaatgaatcggtggtcaggctgatgcaacagcaattgcagcagactgtgatgactcacggctggatttacaccgacgctcagctgttacgcgatgatattcaaacacttttcacggcagaacgatattgaccaagacgttactggacggccccggtcgcgtgctggagtcggtttatccccgctttttagtggatctggcgcagggcgatgatgcccgccttccacaagcccatcagcagcagtttcgtgaacgactgatgcaggaacttcttgcgcgcgtgcagcttcagacatggacgaacggcgggatgttaaatgcgccgcttagtctgcgtctgacattggtggaaaaactggcgtcgatgctggatcccggtcatctggcactgacgcagatcgcgcagcatctggcgctgctgcaaaaaatggatcaccgccagcactctgctttcccggagctcccccagcaaattgccgccttgtatgagtggttttcagcccgttgtcgctggaaggaaaaggcgttaacgcaacgaggcctactggtgcaggcgggtgaacagagcgagcaaatttttacccgctggcgtgctggggcgtataacgcctggtcgttgcctgggcgctgttttatcgttctcgaagagttgcgttggggggcatttggcgatgcctgtcgtctgggaagcccgcaagcggtggcgttgttgctgggtgatttgcgcgtgaaagcgacacaacatctggcagagagtatcaatgcggccccgaccacgcgtcactattaccatcagtggtttgcctcttcgaccgttccgacgggcggggatcatgctgattttttaagttggctgggaaagtggaccacggcagataaacaacccgtttgctggtcagtgacccaacgctggcaaactgtcgcgctggggatgccacgactctgttcagcgcagcgtctggcgggggcaatgctcgaggaaatcttctctgtaaatttggtgtaaataatcagttacatcaatgagtcctaaacgaaatccatgtgtgaagttgatcacaaatttaaacgctggtagggtaaaaaggtcattaactgcccaattcaggcgtcaactggtttgattgtacattccttaaccggagggtgtaagcaaacccgctacgcttgttacagagattgcatcctgcaattcccgctccccttttgcggccgtcgcgctgatttttctggcgtttgcggaaatgggccaactctgcgaggaaagctatgctgaaaaggaaaaaagtaaaaccgattacccttcgtgatgtcaccattattgatgacggtaaactgcgtaaagccattaccgcagcatcactgggtaatgcaatggaatggtttgattttggtgtttatggttttgttgcttacgcattaggtaaagtttttttcccgggggctgaccccagcgtgcagatggttgctgcacttgccactttctccgttccctttctgattcgaccgcttggcggactcttctttggtatgttgggcgataaatatggtcgccagaagatcctcgctatcactattgtgattatgtcgatcagtacgttctgtattggcttaataccgtcctacgacacgattggtatttgggcaccgattctgctgttgatctgtaagatggcacaaggtttctcggtcggcggtgaatataccggggcgtcgatatttgttgcggaatactcccctgaccgtaaacgtggctttatgggcagctggctggacttcggttctattgccgggtttgtgctgggtgcgggcgtggtggtgttaatttcgaccattgtcggcgaagcgaacttcctcgactggggctggcgtattccgttctttattgctctgccgttagggattatcgggctttacctgcgccatgcgctggaagaaactccggcgttccagcagcatgttgataaactggaacagggcgaccgcgaaggtttgcaggatggcccgaaagtctcgtttaaagagattgccactaaatactggcgcagcctgttgacatgtattggtctggtaattgccaccaacgtgacttactacatgttgctgacctatatgccgagttatttgtcgcataacctgcattactccgaagaccacggggtgctgattattatcgccattatgatcggtatgctgtttgtccagccggtgatgggcttgctgagtgaccgttttggccgtcgtccgtttgtgctacttggtagtgttgcactgtttgtgttggcgatcccggcgtttattctgattaacagtaacgtcatcggcctgatttttgccgggttactgatgctggcggtgatccttaactgctttacgggcgttatggcttctaccttgccagcgatgttcccgacgcatatccgttacagcgcgctngcggcggcatttaatatttcggtgctggttgccggtctgacgccaacactggcggcctggctggtcgaaagctcgcagaatctgatgatgccagcctattacctgatggtagtggcggtggttggtttaatcaccggcgtaaccatgaaagagacggcaaatcgtccgttgaaaggtgcaacaccggcggcgtcagatatacaggaagcgaaggaaattctcgtcgagcattacgataatatcgagcagaaaatcgatgatattgaccacgagattgccgatttgcaggcgaaacgtacccgcctggtgcagcaacatccgcgaattgatgaataagctgaaacggatggcctgatgtaacgctgtcttatcaggccaattgaactcttaaggttcacttaatctctgacgcgcatactctcctccaggttaacggaggagagtgcaatgaaaaaccgtgtttatgaaagtttaactaccgtgttcagcgtgctggtggtcagcagctttctttatatctggtttgccacgttctgatctttcttcagccgtacccaggcccgcgtgccggaagtctcttgccggttttgcaggaaaaactgcccgtgatgcaactgtgtaatgcggctgacaatacttaaccccagaccaatcccgccataacggctgtccatacgtacaaacgctttactcaactccccgcatttactctcatcaatacccggtccttcatcttcaacggccatgaccgctccgccatcttcttgcagcttaatcataatgttgctgccttgcgggctgtaacgatgggcgttttctaccaggtttcgcaataacatccgcagcagggttgcatcaccctgaacggtgatgtcggcggcgctctctggcaatagcagggtttgctgtcgctggtcgagcatggtactgagttcgtcatacgaggggagaatgacatcttccagcagttttacatgttgataattaccggaagaaaatgactgtccggcacgcgccagttgcagcagctgggagacgctctccatcatctgatcaagccgtgccactaacggtgctacatcaatgtgatgcgttttcgccagcagttccagatgcaaacgcacccccgccagtggcgttcgcagttcgtgcgcgacgtcagcggtaaataacctttcgttatccagcgtgctggtcaggcgactgaccagatcgttcaacgccgaaaccaccgcttcgatttcgagggtggcgctgtgaatggcaatgggcgttaagttgtcggcggtgcgcgcttccagctctttttgcagctccgccagcgggcgggtgatgcggcgtaccgcctgatagcagataaatagcgtcaggctgaccataaagacgccggggacaatcaggctggcgaccgcctcgcggatctcacgcatgatgtggcgatcgttgttgcgattgtcgcgtagcgcctgctcaaacagctgaatctgctcggtactttcatgccatagccagaagacgctgatcagctcaaacaccaacaaaatggccccgatggtcaatatcagccgttggcgcagcgatattggtcggcgcagaaaacgcatcagattcaattagttttcctcattcgcgacaagcatatagccaaagccgcgcacggtgcggatacgggctttgcccactttgtcgcgcagattgtggatatgcacttccagggtgttggtcgagggttcattgtcccagttatagatgtcgttgtagagaatttcccgatgcaccggactgcctgctttgagcattaaccgtgacagcagagcatattctttgggcgtcagaatcaactcttcaccgcccatccatacctgacggcgacccatgttcagcgtcagattgccaacaatcagctcactttcgccctgattattatggcgtcgtagcagggcgcggatacgggcatgtaactcttccagcgcaaaaggcttcaccagatagtcgtcggcaccgacatccagcccggcgattttgtcggtcagcgtatcgcgagcggtgaggatcagtaccggcagggtatattttttctgccggatacgggcgagaaaatgcagtccatcttcgtcgggtaaccctaaatccagtaccaccaggctgtaatgacctgcctcaaggctttgttccgccatccgcgcggttgtcacgccatcgcacgcgtagccttcggtttgcgccgccagaatcagtccctgcaataacagcgtatcgtcttcaacaatcagaattttcattcactcactctcctgcaagtttgcagaatatcatccgcagcctggtaatacttcgtctcaacgccagttaatcccaatagcgtggagaataaattgtcttgtgaatagtgttgcgtttgcgcctgtttttgcaggcagttctggtcaacctgataccgtttttgataatcctccgacagccacagcagcatcggcacctgtttttggctatccggggcgatggcataaggcagaccgtgcagatagatgccattttcacctaacgattcaccgtggtcagaaagataaaccaggctggtggtaaatttatcctgatgttctttcagcagattaatcgctttatcaacaatatagtcgacgtaaaccagcgtgttgtcgtaagtgttcaccagttgctctttggtacaggtctggatctcattggtgtcgcaggttggggtaaatttcctgaactgcggcggatagcggttgtaataggtcggaccgtggctgccgatggtgtgtaagacaatcacgccatcaccctgcagattattgatgtactcttccagcccgtggaacagcacttcgtcatagcattcgccgttgatgcactgatcaggcagattcagcgcggtgacgttctggtgaggcacgcggtcgcaggcacctttacagccgccatcgttgtcattccacagcacgttgatgcccgctcgctgaatgatatccagcacgccttcctggtgctgtgccagctcttctttgtagtgctctcgcggcatatccgagaacatgcacggtactgaaactgccgttgccgtgccgcaagatgcggtatgagggaaatagaccacgttatctttcgccaaccgcgggttagtttcacgcgggtagccgttgagggagaagttctccgcccgcgaggtttcgccgacaatcaggatggtcaaatttttacgtttttcgttctgcattaatgggttgcggtgcgcgtcttcaccaattcgcaccagcggcagatttgccagtcgctgatgggagtaccatgaccagctggcaacaatgctgttagaggggcttaaggacttcaccagctctttgttgttgcggaacaacgaggcgtagtctttataaaatagtgcggcgaccagcaaaatcagcagtacagaaaccagaatattggctccacggaaaagaacactgcgcagacgcgaggtggcaggtttgattttaatccagcaggcaatcagcgcagcaagcacgccgctgaatcccagcgttaataacatttgcggtgtcatcagcgcatagctttctgccggagtggtatcaataatattggcaatcatcgagcggtcgatgacgatgccgtaagtcattatgaaatattgtgcagccgcgccaaccagaataaacaggcaggccagcggtcgattaagccataagaaagagcttagtgtcaggacaatattaatcacgctgaaggcgacgaccggcatcgacaagaaaaccagtacgttatgcagcgagtccagcggcagcgcctgcaacacctgtttaaaaaaggcaatattcaggcagatagagatataaaaagcggccaacaatagccaggcgagtaaattcaaagagggtctttttagtaggcgcttcaacatcacggtgtttccatcgaacaaagtgcgcatatgctcgcaaagcaaaattaagccaaccttaagttcttaagattggcttttatctttgctggattaaggggaattaatctttgcttattggtgcatctaagggatacgggtttttatgcagccggttgtaattcagcgcatacatggcggtgatgaccatcagggtgacaaatgaccacataacctctttcgccccggaccccaccacggcccagatgcagtagaggaaggcaatggtagtaaccgccagatatgccgggcgtgctttaccaaagtgaccgtgtccgagcagcagtaacgccgcacaggtgtaaagatatggcaccagtgtaaagatgaccgacacggaagaaaccagaccgaattctttggtcgcgtttggtgaaatgctgctgagctggaagatggtcatcaaaataccgacgataatcagccccgccactggcgtacccgctttatttacacgggcaaaaatcggtgggaacagtccgtcatcggcagccgctttcgccgtttgacccgccagcaatgtccagccgcccagtgaacctaagcaacccgcagctgcgcagaaggaaacgatggccccggcggtgtcacccaacgccatccgtgcggcatcaccgaatggcgaggcagaaacgcgcagtgcggcattagggatcatccccataatcgcggtggtggagagcacatagcaaacggcggcaatcaataccccaccaatggtggctatagggacgttgcgtttcgggtttttcaccacacctgcggcaacggaggcactttccacaccgatgaacgaccacagcgtaacgttaagggtactttgaattgcaccgaaggtgcccaggccgctgacgttccatgccgccatataggtttcaccacgaaaccagaaccagccaaatacggcaatcccgacgatggggatcagcgccagcacggtggcaacggcctgcacacgggtgatcattttcggaccgacaatgttcagcaggacgaagatccacagcaccacgacgcaggtgatggttaataccaatggatctttcagaatcgggaagaagtaacttaaatatcctacgccaatgaccaccatggcgatattgccgatccagcaggccagccagtagaggacgttggtttgataaccgagaaacgggccaaagcagcggcgggcgtaagcgtaagaaccaccaggacttgggtcgaggaacgacattttggcgtataccatcgagagccccagcgcaccgataatcgtcaccaaccatccataaatggcaatcccgccggtggaggccaggtttgcaggtaacagaaaaacacctgaccccataatattccccgacaccatcagggtgacggggattaagcccactttgtgagcatcagcatccgaagacataattaaactcctgcgaaggcgagcttcgtgacaataaattacgtcatatcatacgcctgcattcgatagttgaattattatcgaccgggttatcgctgatgccgttattaatatagctcttcgttaaggttaaaaatcaggcgacagtgcgttctctgtgctgactaacataatgcagcggcgtcataccgtagaagtctttaaagacagaaataaagtacgacgtactgttgtagccgcaggactgtgatacctgagagatatttttaccgtccatcattaattcatttacggcataacgcatgcggcaggtggtgattatttggctataactggtgttttcgcttttcagctttttctttaacagacttgggctaagacataaacaactggctaccatactaagattccagtctttgtgaatatcgctttcaataatttgataaacgctgtcacttacacaattacgtaacatatacatcattaatgaaaggaattttttactgtcgagaaaacgggatagcaccgtgaataataatgcgcgtgttcgttccttttctgactcagtttctgcgggcatcatgctgtgttgcgcggcaacgcgaaagacgtctggtgtcaggcatggcagggtgagaatgggcgtagcgctacgttgccatactggtatttgcgagagatctttattcagaaaccggaggtaatctttgatgatgtcgtgactaatatgagcaaccaaagtgttgttaagagaggagacgtcgataatattattttcacaatttaataacgccatatggttagctttaaggctaataggttctttcccattcacccttatccagacatctttttcagtcaataaaacaatacaaggttggtcgctgcaaatcctcatacatgtactcctgagtgcgaataaaagaccagttctcgctaaagcaaagcgataccgggaaatggttatataattgtatgatgaatataaacatgcataaaaataacgagttttactaatattacaaattt

SEQ ID NO: 1669 - DNA, 2554 bp, Escherichia coli
  Strain O55:H7
  modified_base (97)..(97): a, c, g or t
  modified_base (101)..(101): a, c, g or t
  modified_base (1765)..(1765): a, c, g or t
  modified_base (2208)..(2208): a, c, g or t
ttctcatgtacatatttttttacagggtaaataacaggcaaaaaaaagcgcggggtggggccgcgcaaaaagtatgacatttttgtttgcagcaatntttntgaaaacgttgccatactcaaaaggcctaaggccaggcggcgtaatgttatttaaacaattacgccttcagcggaatagtggttacgctttcacacacataacgtggtaaataccgtcaataatttcagtcccttcagtttcgtgttcaaatccagggaaatgatggtcccaggattgcagcgagcgtaaataacttacttgcggactgtttttatcgccgaagttttcaccagacagcagcatcgggattcctggcggatacgggataactgagtttgccgcgatacgtcctggcagattttcaatggataccagttcgacattgttgtcgacaatcgcgttgtacgcttcacgcggggtgatttccgccaccggcaggccggaataggcttcgttcaaccgtgcgccagggttgttttctttcagccaggcaaacatggtgtcacccagatcgtgaatccccatgttcgcgtaagtgtcaggatattgttcaacaagttccggcatcacctgcgccagcggtgtgttggcgtcatagtggcgtttgaaggagcaaagggtgttaaccagagtcccccatttcccacgggttacgcccatagagaacaggaacataatttggaagtcagtggtgcgggtaggcacaatgccgtggcgaccaagccaggcagtgaccagcgccgccggaacaccggtttcttccagttcaccatcttcacccattcccggagcaaggatgctgactttaatcgggtcgagcatactccagttatccggaatatctttgaagccgtgccagctttcgcccggatgcattacccagcagtcctgaacggtggtcagcagtttggttggtgcgtcagcaaagtcataggttttgccggtttgtgggtcggtgacgacttctttgttccacggtttgaagaaccagctaccgtcagcggcgaactctttatacagccgcgccatcgcctgacggaaatcaaccgcttcgtcgatcacttcctgcgtcagtgacaggccgctgttgccgtccatcatcgacaccgccacgtcgttggatgcgcagatggcatacagcggggaggtggtggcatgcatcatgtaggcctggttgaagcgggagaagttaatcgccccacgaccttcacgtacatgaatataagaggcctgtgaaagcgcattcagcagtttgtgggtggagtgggtggcgaaaacggtaggaccgttgtgatcgccaggttcgccgcgcatggcatagtgatcggcatagatcgggttgaaacgtgcatagccgtaccaggcttcgtcaaagtgcagacgatcggaggttttttccagcagatcctgcgcttctttagcgttataacacacgccgtcataggtgcagttggtcaccacgcagtaagacggtttttgcccggctttgtctttagtcagcgggctttcactgattttcttctgcaaggtttcaggttgcatttcctgcggatagattggcccgataatgccgtagcggttgcggcttggcaccatgtagaccggtttcgcgcctgtcagcatcaaaccttgttcgatggatttatggcagttacggtcaacgaccacgacatcgttatcggtcatgcaagcctgcatgatggtgcggttagagccggaagtnccgacgactaccgaccaggagcgatcggcaccaaatacgcgtgcggcatatttttcgctttcgccaaatgcgccagtatggtcaagcaaagaaccgagggaagttcgttcgatgcccatgtcggtgcggaacagattttcaccgtagtagtcatggtagaaacgtccggcgggtgttttggtaaaaccaacgccgccctggtggcctggcgctgcccaggaatattcatggatgtcgctatatttcatcagcgcgctgaacagtggcggcaacagctgctggcggtagcgggtcatcgcggcaacggcgcgtccggcgataaagtcggcggtatcttccagaatccaggcgaattcatcgacaagctccagcagatcccggtccattgcggcgagggctttttcccgatcgcccaacaggaagaccggcacgttttgttggcnctcatgaagcttaccgatcaattgtctgacgttttgatgttcgtccggatgttccatttgatagctgaacatcaggcagtcaatggcttcgtttgaagagagaatggcaaaaccatcatcaaaggaggtggatttaatcacggtaacattttgctggcttaaagcatctgccagacgctcaacagcgttaccgacccaggtgtcttgatggagaaactcgctttcaacaattaatactttcatcattgcttacccggttatgaaggaatcttcgttgcgggcaagtatcttccggccttttcgggctgtaaagcgcgtgaaaaacaaacatttttgaaatatttgt

SEQ ID NO: 1670 - DNA, 19664 bp, Escherichia coli
  Strain O55:H7
  modified_base (185)..(185): a, c, g or t
  modified_base (1720)..(1720): a, c, g or t
  modified_base (2685)..(2685): a, c, g or t
  modified_base (2937)..(2937): a, c, g or t
  modified_base (5705)..(5705): a, c, g or t
  modified_base (6265)..(6265): a, c, g or t
  modified_base (12306)..(12309): a, c, g or t
  modified_base (13964)..(13964): a, c, g or t
  modified_base (17831)..(17831): a, c, g or t
  modified_base (18713)..(18713): a, c, g or t
taaacaatatgttatgtgattattttaaattattttcactgcttattatcgacggctaaactatttttttggctgatactgatatcgtctttagccgggaaacgtctggcggcgctgttggctaagtttgcggtattgttgcggcgacatgccgacatatttgccgaacgtgctgtaaaaacgantacttgaacgaaagcctgccgtcagggcaatatcgagaatacttttatcggtatcgctcagtaacgcgcgaacgtggttgatgcgcatcgcggtaatgtactgtttcatcgtcaattgcatgacccgctggaatatccccattgcatagttggcgttaagtttgacgtgctcagccacatcgttgatggtcagcgcctggtcatagttttcggcaataaagcccagcatctggctaacataaaattgcgcatggcgcgagacgctgtttttgtgtgtgcgcgaggttttattgaccagaatcggttcccagccagagaggctaaatcgcttgagcatcaggccaatttcatcaatggcgagctggcgaatttgctcattcggactgtttaattcctgctgccagcggcgcacttcaaacgggctaagttgctgtgtagcaagtgatttgatcaccatgccgtgagtgacgtggttaatcaggtctttatccagcggccaggagagaaacagatgcatcggcagattaaaaatcgccatgctctgacaggttccggtatctgttagttggtgcggtatacaggcccagaacagcgtgatatgtccctgattgatattcactttttcattgttgatcaggtattccacatcgccatcgaaaggcacattcacttcgacctgaccatgccagtggctggtgggcatgatatgcggtgcgcgaaactcaatctccatccgctggtattccgaatacagcgacagcgggctgcgggtctgtttttcgtcgctgctgcacataaacgtatctgtattcatggatggctctctttcctggaatatcagaattatggcaggagtgagggaggatgactgcgagtgggagcacggttttcaccctcttcccagaggggcgaggggagtgtccgagcatcatgaggccgaaaactctgcttttcaggtaaattattcccataaactcagatttactgctgcttcacgcaggatctgagtttatgggaatgctcaacctggaagccggaggttttctgcagattcgcctgccatgatgaagttattcaagcaagccaggagatctgcatgatgtctgcacccaaaattacatttatcggcgctggttcgacgattttcgttaaaaatattcttggtgatgtgttccatcgcgaggcgctgaaaacggcgcatattgccctgatggacattgaccccacccgcctggaagagtcgcatattgtggtgcgtaagctgatggattcagcaggggccagcggcaaaatcacctgccacacccaacagaaagaagccttacaggatgccgattttgtcgtggtggcatttcagattggcggttatgcaccttgcacggtgactgatttcgaggtctgtaagcggtatggtctggaacaaaccattgccgatacgttggggccgggcggtattatgcgcgcgctacgtaccattccgcatctgtggcaaatttgcgaggacataacggaagtctgccccgatgccaccatgntcaactatgttaacccaatggcgatgaatacctgggcgatgtatgcccgctatccgcatatcaaacaggtcgggctgtgccattcggtgcagggaacggcggaagagctggcgcgtgacctcaatatcgacccggctacgctgcgttaccgttgcgcaggtatcaaccatatggcgttttacctggagctggagcgcaaaaccgccgacggcagttacgtgaatctctacccggaactgctggcggcttatgacgcagggcaggcaccgaagccgaatattcacggcaatactcgctgccagaatattgtgcgctatgaaatgttcaaaaagctgggctatttcgtcacggaatcgtcagaacattttgctgagtacacaccgtggtttattaagccaggtcgtgaggatttgattgagcgttataaagtaccgctggatgagtacccgaaacgctgcgtcgagcagctggcgaactggcataaagagctggaggagtataaaaacgcctcccggattgatattaaaccgtcacgggaatatgccagcacaatcatgaacgctatctggacgggcgagccgagtgtgatttacggcaacgtccgtaacgatggtttgattgataacctgccacaaggatgttgcgtggaagtggcctgtctggttgatgctaatggcattcagccgaccaaagtcggtacgctaccttcgcatctggccgccctgatgcaaaccaacatcaacgtacagacgctgctgaccgaagctattcttacggaaaatcgcgaccgtgtttaccacgctgcgatgatggacccgcatactgccgccgtgctgggcattgacgaaatatatgctcttgttgacgacctgattgccgcccacggcgactggctgccaggctggttgcaccgttaaaacgcgactaaacgctactgcgccgggggatttattccggcgcacacntctgacgataccaataacagaaggcgggcgttggtaacagcgacccgataccctatgagcatttcaatgactacaaaactcagttatggatttggagcgttcgggaaggattttgcgatcggcattgtgtatatgtacctcatgtattactacaccgatgtcgtcgggctgtctgtgggtttggtcggtactttgtttctggtggcgaggatctgggatgctattaacgatccgattatgggatggattgtnaatgctacgcgatcgcgatggggtaagttcaaaccctggatcctgatcggtacgttggcaaactctgtaatcttatttctcctctttagtgcgcatctgtttgaaggtactactcagattgcctttgtttgcgtgacctacatcctctggggcatgacttacaccattatggatattcccttctggtcgctggttccaaccatcacgctcgataaacgtgagcgtgaacaactggttccttatccgcgtttttttgccagtctggcgggctttgttacggcaggtgtgacgctaccatttgttaattatgtcggcggtggcgatcggggatttggctttcagatgttcacactggtactgatcgccttttttattgtttcaaccatcatcactctgcgcaatgtgcatgaagtcttttcgtcagacaatcaaccgtctgctgaaggaagccatctgacacttaaagccatcgttgcgcttatttataaaaacgatcagctttcatgcctcttgggtatggctcttgcttataatgtagccagcaacattattaccggctttgctatctattatttctcatatgttatcggtgatgcggatttgttcccctattatctgtcgtatgcgggagctgctaacctggtgacgttagtattcttcccacgcttagttaaatcattatcccgacgcattttatgggccggagcatctattcttccggtgttaagctgtggtgttctcctgttaatggcattaatgagctatcacaacgtcgtcctcattgtgattgcgggtattttgctgaatgtgggaacggcgcttttctgggtattacaggtcatcatggtggcagataccgttgattacggtgaatataaactgcacgtacgctgtgaaagcatcgcttactccgtgcagactatggtggtgaagggcggttcagcctttgcggcttttttcattgcggttgtgttagggatgattggctatgtaccgaatgttgaacagtctacgcaagccctattaggtatgcagtttattatgattgctctaccgactctgtttttcatggtaacgctgattctctacttccgtttctatcgcctcaatggcgacacgctgcgcaggatccagattcatctgctggataaatatcgcaaaataccgcccgagcctgttcatgctgatattccggtcggtgcagtgagtgatgtgaaagcctgacgtggacaatagctaacgaaaatggcctgatgcgatatgtttatcaggccacgtcttaatggaatgctttggatttgcaaattttgtagaccggataaggaattcacgccgcatccggcatcaacaaagtgcacgttgttatccggttatcaagccaaagcgccgtagctgacggcaatgaaagcgagcgaggaatatcaccgtggttaatgcgccaagcagcgcgcagaacatatcggattgcgtgtcccactggtcgccctgggtgccgagaaaatcatccgctccctggcccattgccagcgccgcccaccactcgattaattcatacatcgcgcttatcgccagcgccacgcaacagaccagaaacgccaccattttacgtccgcgaacgtacatcccgcgcacaaggatctctcgtgccaccagtgcaggcaccagcccctggaaaaaatgccccagcttgtcatacggattacggctcaaccccagccattcctgcacctcaaaaccgatggggactttcgcgtaggtgtattgcccgccgaccatcaggatgatggcgtgaaagaaaatgagcgtatagagcagcggcgttaacggataacgtttagcggtggcaagcagtagcggcacgacaataatcaccggtgtcacttccatcagccaggtgagtttgtcatgggccgaaatgccggtataaatcaggattaacgttagcgccagtgcgccggtgttaagaattaacggcttgagtgtgcgggtcatggtgagttcgcaagtcagggaaaatactgactattcaccagcaagcgtgaaattacaatcgcaaaagaggtggcccagggggatcacctggcagcatgctgccaggcgctgggccgaagaggttacttagtgcagttcgcgcactgtttgttgacgatttgctggaagaagtcgttacctttgtcatcgaccaggataaacgccgggaaatcttctacttcgattttccagatagcttccatacccagctccggataagcgacgcattccagatgcttgatgctctgctgcgccagtaccgccgccggaccgccgatgctaccgaggtagaagccgccgtgtttatgacacgcgtcggtaacctgctgactgcggttacctttcgctagcatgatcatgctgccgccgtgggattgcagcagatccacataggagtccatacgacctgcggtggttgggccaagtgagcctgatggataaccggcaggggttttcgccggacccgcgtagtagatcgggtgatctttgatgtactgcggaagttctttaccggcgtcaatcagctctttcagcttggcgtgtgcaatatctcggcccacgataatggtgccggtgagcgacaaacgagtggaaaccggatattgcgaaagctgggcgaggatctctttcatcgggcggttaaggtcgaccttcaccgcttcgccttcaccggcctggcgcagttcttgtggaatgtactgacctggatggtgttccagtttttcgatccagatacnttcgcggttgattttcgctttaatgttacggtcagcggagcaggagacgcccatgcctaccgggcaggatgcgccgtgacgtggcagacggataacgcgaatgtcgtgcgcgaagtatttaccgccaaactgcgcgccaagaccgagtttctgggcctcttccagcagttcctgttccagctggacatcgcggaacgcctgaccatgttcgttcccttccgtcggcagttcatcgtaatagtgagcgcttgctaacttaacggttttcaggttggtttccgcagacgtaccgccaatcacaaacgcgatatggtacggcgggcaggctgcagtaccgagggtacgcattttctcgacgaggaagtttttcagtttgccgggagtcagcagggctttggtttcctggtagagataggttttgttggcagagccgccgcctttcgcaacgcaaaggaatttgtactcatcgccatctaccgcgtacaggtcgatttgcgcaggcaggttagtgccggtgttgatctctttgtacatgtccagcgccgcgttttgcgagtagngcaggttatcttcgatataggtgttatagacgcctttcgacagcgcttcttcatcaccgccaccggtccacacgcgctggccttttttaccgacgatgatcgcggtgccggtatcctggcaggtcggcagcacgcctttggcggcgatttcggagtttcttaagaattgcagtgccacgtacttgtcgttttcgctggcttctggatcgtgaagaatagccgcaacctgtttctggtgtgccggacggagcatgaaagaagcgtcgtggaaggcttgctgcgccagcagggtcagggcttctggttccactttcaggatggtttcgccgtcgaagtcggcaacgctaacgtaatcggaagtgagtagatagtattcggtattgtctttccccatcgggaaaggtgcctggtagataaagggtttgtttgacatagcttccagcctgtaactctgtatttgttattcgaaaatggcgtgccgcgtagtaacgggcggcacgcaaagtgcatttataagaacccgtacatcgcggcgaagatccagccgaagacgcacgatacgctcacaccaatcaaccccggcagaataaagctgtggttgatgacgaagcgaccgatgtgggtggtgccggaacggtcaaactgaatcgctgccagatcgctcggataagtcggcaggatgtaataaccgtagcaagccggtgctgaagccacgatgtatgccggatcaacgccgatcgctagcgcgaccggaacaatcgccgccagcgccgcagcctgagagtttacaaacttggaaaccagcagcagaacaatggcataggcccacggatactctttcaccatttcacccagtacgccctgaatttcagacatatgcgcaccgaacatggtttctgccatccatgcgataccgtacaccgccacgatggcgatcataccggaacggaagacttcgttttttgagatagacgcgggattggttttggtcaggataataatcagcgccccggtcagcagcataaacatctgaataaccagtaccatcgacagcggtttgccgccgaaggatggacgcaggtccgaatcagcaccaagaagtgcgactacagcgattgccccgaggaaaatccacattgccagccagttgcttttcggcagttttttatccagcagcgtcgcggtatcaccgtaaacatactcacggttttccggtacggagatgaatttctggaactcttcgtctttatccagatctttaccgcggaaccagctgaagataccgatcgccaggataccgattaacgtcgatggaatggtgattgccagcaggtcgaggaactcaagatggcgaccatcaaaggtgacattacccagcattgcaaccagagacacgaccgcaaccgacaccggactggcgataatccccatctgtgcaccgatagaacttgccgccatcggacgttccggacggatgttgttcttaatggcgacgtcgtagatgatcggcagaatggtgtaaaccacatgacccgtaccgcaaagaatggtcagcgtacaggtcacaaacggcgcgacaattgagacatatttcgggttgcggcgcagcagcttctcggcaatttgcagcatgacatcaagaccgcccgaagcttgcaaggtcgccgatgccgccaccaccgcaatgataaccagcatgacatcaactggtggtttacctggctgaaggtggaagacgaagaccagaatgaccagaccgataccgcctaataaacccagcgcgataccaccctttctggcaccataaaacagacatatcagtattatgataagttggatagtaaataacatgtgtgaaccctcgcgataatcctatttaaatttttgctgaatagatcacagtcacgttctgttttgtatgaactgttttcagagcctgactaaatatccgtttggtcgttaccggctttagcaaatacctcacagtgaatattggctgattaaagcagcggcaaatttatgcactgtgataagcggctttttcagagagaaaaactctctggcgatgggtttaaagtttgtactgcgcagatgttaatgttttgtttgctgttatcttattgatatttatcggtctattttttgttctcagggcagatatcattaggtttatagattaatctgatctacccatttgtgggtaaaaatacacataatgcgggtgacataatagttaattaacttttgttagcgttttgaaattaaaaacaccgttcacctgaagagatattaatttttagcgatgatggagggataattatatttgatctggcacaagttttactgatgaaggatgtaacttgtgccaggggtattttgcattacggtaataattattacttacagataaccagcgatccgttattggcaatattgtttcagtagtgagtagtgttctgcctgaatacggtaacggtaaactggacgccccgtgacgccataatggatactggtgaacaagatgtggcagttgaccagccagataaggtatttacggcaggaaacacgcgaaatgttaacctcgttggctagctcgtcggttgaaaactcatagtcctgatgcgcgtcaatccactggcacagtgtgcgtaacgtctgcggcgttaagccttttggcaagcgacgaggatcctgctcgttggagctgctgccgtggattagctgatcaagctcggcctggtcataatactgatgtttttccagcgccattttcttttgccgccagccggtgagcgcctcttcaaagcgggaagcctggaagggtttgatcaggtaatccacgacaccgtaatgcagcgaatctttaatggttgccgcatcggctgcggaggagatgacaatcacatcacttttgcaacgcgcgttatgcaggacaggcagtaaatcgagcccgttctctttttgcatatagatatcgagcaatatcaggtcgataggcgtatcgctattgaagataatctctttggctttctccagcgtcgaggctgttccacagcattgaaagcctgggatttgtgctacgtatcggcgattcagctccgcgaccattgcgtcgtcatcgataattaatacattgatcatctgttcgacctctccccgtcccagggtatctggacaaaaaattgtgtgaaaatcccgggttccgattccacggcgatgctgccgccgagattttctacctgttgtttgacaagtgctaaaccgacgcctcgctcgcttccttttgtcgagacacctttgtcaaaaatgtgatcgattttgtcgggtgcgatccccggtccatcatcgttaacttcgcagtgcagccagccgtgacggtagtgcaatgttacgctaatttcgccaccgggttccggccctaatgcttccagcgcgttttctatcagatttcccaatgtggtaatcagcgtcgcgacctggtcctcactgccgctgtctggcagctggctttcactgtttaaaatcagcgtatggcctaaatcggtcgcgcggttaatcttgctgattaaaaaaccagcgataaccggagatttgatcttacccagcagagagccaatctcttcctgatagttattggctgttttgagaatgtaatcttccaactgcttataactcttcagatgcaataatccgagaatcacatgcaatttattcataaattcgtgggatcgttcacgaagtgcatcagcatagttgaccagaccgtcgagtcgctgcatcagtttacgaacttcagttttgtccctgaaggttgaaatggcaccgatgataacgccattactgcgcaccggaacggtgttgatcagtaatagccggtctttaatcgtaatctcttcgtcgcggcgcggcgtaccgtcgcgtaacacttccgagacatctaccacctgtgaccatgagtggctgagcgtcgacagtttctcatcgtcctgcgacttacggtaattcagcaattcttgtgcggcatcgttgatcagcgtgacctcgccgcgatcgtccacggcaacgacgccttctttgatagactgcaacatggcctggcgttgctcaaacagcgtggagatttcgtagggttccaggccgaaaaggatttttttcagtaccttaaccagaatgcaggtgccaatcagtccgaccagcatgccaaataataccgaccagataatgctccagcgactgtcattgatctgttgggtcacgcggcttaactcaaggccgatcgccaccacgccaatttgtttatgattttcatcgtagatgggggtaaatacgcgtaaagcctgcgccagaaaaccgcgattgatagcgacattttcttcgccattcagcgctttaaggatgtcatcacctttaaatggctgaccaatacgctgggcttcaggatgcgagtagcgaagactttgcatatcggtaacgacaataaacagcagatcgttgcgtttgcgcacggcttccgcgatggcctggatgccgctctcctgcggttttttctgcaagccctgacggatttccggcgagtcggcgagagtacgcgccactgccagtgccttgttggctagcccgtctcgcgtcatatcactgatttgcgagaagtaaatcagatgcaccaccaatagcaccgagaacagtaccgcgctgaccattaagatcactgtggtactcaatttcatcggacgtttgcgtaacatgcggtagggcaatgaatgtctcatcagcttccttgtgtgacaaatttcttaagcattatctctgatgaggcgggtaattcaaagggagtaagaatgattggctatataggggaagagactctggcaacggaaactgccagtgctgtatgaagattccagggctatgcttatagtgaaaaccatactgatgagagagggaaggtcatggatcaggcgctactggacgggggttatcgctgttataccggcgaaaagatcgatgtctatttcaacactgcgatatgtcagcattctggcaattgcgtacgtggcaacggcaagttatttaatctcaaacgaaagccgtggatcatgccggatgaagtcgacgttgccactgtggttaaagtgattgatacgtgcccgagtggtgcgctgaaataccgtcataaataagcgagggtaaaatggaaatacgcgaaggccacaataaattttacattaatgacgaacaaggcaagcaaatcgctgaaattgtctttgtgccgaccggagagaatttagcgattatcgaacataccgatgtcgatgaaagactgaaagggcaagggattggtaaacagctggttgcgaaagtcgtggaaaaaatgcgtcgggaaaaacgaaaaattatcccattatgtccatttgcgaaacacgaatttgataaaacgcgggagtatgatgatattcgcagttgatggaagagtacagattcacgatatttttcatgctctccgcggtgtgatgcaggagagcatctgaagggtagggggatgcacaaagaatgggcagagagcgcgtttttttgtcccaagtcatcccctttactgagcaaaaaaaagaatatctcctatatgagaatcatcaatcggggttaataaattttgcgtccccagagtgttcaatatttataggagtcatattatggaaggtaaaaacaagttcaatacttatgttgtttcttttgattatccatcatcttattcctcagtgttcttaaggttaagatcattgatgtatgatatgaatttctcttctatcgtggctgatgaatatgggataccacgacaattgaatgaaaattccttcgcaataacgacatcgttagccgcaagtgaaatcgaagatttaatcaggcttaaatgcttagacttaccagatattgactttgacctcaacattatgacagttgatgactatttccgtcagttttacaagtagccaggaaggataagaagaacataaaaaatggcactattctctaaaatattaatnnnntatgtgattggtgtgaacatatcctttgtcattatctggtttatctcacatgagaaaacacatattcgtttacttagtgcattcctggtcggaataacctggccaatgagtctgcctgtggcattacttttttctctcttttaggagctgtagttgagtggacccgctggttatcgtgaaacgaagcgtctctcctcaaaactggatttgcggaacgatgaacgaagcagtcgcctgactgcttcgttcattaaagtgaaatttatttctgtgggcgcatcgccgggaagagaataacgtcgcgaatagtatggctgttagtaaacagcataatcattcggtcgataccaatacccagaccagcggttggcggcagaccatattccagcgcagtcacgtaatcttcgtcatagaacatggcttcgtcgtcacctgcggctttagcgttaacctgttcctggaaacgttcagcctgatcttctgcgtcgtttaattcgctaaaaccattaccgatttcacgaccaccgatgaagaattcaaaacggtcggtgatttccgggttaacatcattacggcgtgccagcggtgacacttctgccggatattccgtaataaaggttggctgaatcagatgtgcttctgccacttcatcaaagatctccgtgacaatacgtcccagcccccagcttttctctaccgtaataccgatagattcagctaatgctttagcagcatcaaaattatccaggtcggccatatcggtttctggacgatattttttgattgcttcgcgcatggtgagtttttcaaacggtttgccgaaatcaaacacatgctcgccataagtgactttagtggtacccagaacctcttgtgccagggtgcggaacagggactctgtcagttcaatcaaatcgtggtaatccgcatacgccatgtagagttccatcattgtgaactcaggattatggcgaacagaaataccttcattacggaagttacggttgatttcgaatacccgttcaaaaccgcctacaaccagacgtttcagatacagctccggcgcgatacgcagatacatatctaaatccagagcattatgatgggtaataaacgggcgagcagatgccccacctggaattacctgcatcatcggggtttctacttccataaagccgcgcgcgaccatgaactggcggatagcggccagaatttttgaacggacaacaaacgtttgacgggatttatcgttagcgatgaggtccagataacgttgacgataacggacttcctgatcctgcagaccatggaatttatctggtaaaggacgtagtgctttagtcagcaggcgcaactcagtacagtgaatggaaagctcacccgtttgcgtcttaaacagcgtaccgcgggcaccgataatgtcacccagatcccattttttaaactgatcgttataaacaccttctggcaggctatctcgtgcgacgtacagttgaatacggccaccgacatcctgcaacgttacaaaggaggctttccccatgatacgacgggtcatcattcggccagcaaccgagacttcaatgtttaaggattccagttcctggttatccttcgcatcaaactcttcgtgcaactggtcagaggtatggtcncggcgaaaatcattgggaaacgccacaccttgctgacgtagtgccgccagtttttcgcggcgatttctcagttcatcgttaaaatcaatagcctcattggctccccgtgtttcttgttcagacattttggttcctctaaatccagctttcaatttagcgtagataaagagacagatcggtacactgtattatctgcctcgactattaataactcagtttatcttatcgaaactaacgcttacctcaagttgatatcactaataaataaccatcaaaatggtttaaatgacttattaatctcgatttactagtgtgataaactgaaagttaatttattcataaccaattgtttttacgacagttaatcgttgctctcctgtaccatattcgtcggcgtgctaaacaggaaacgggtagcaaaggccaataccacgatgatcgcgacacaagccaacgtccactctcccatctgagaaaagaatcgctggtaagctgcaattgccataccgctaatttgcgactctgtcgtctgctgtgccactacgcctgccagccagttggcgaccgcgcctgttgccagcatataaatcccggttaatacgccagacattttcagacgcgtgatttgcgcaatcgccaccgggtcaataaagagttcggcaaagcccattagcgccagcccggataccatcacgcccattgacgcttgaccgtcagctgctgcatgtcgggcatcaaatgccagcaacataaagccacaagccatcagcagtaagccaaaggcaaacttcagccagacgcgcaatgttgagttgccgtggctttctggcgacgccagccaggccagaacaaccccagcgagcatcaccgcaattgcattcaccgactggaatagtgcagtaggtacttcaatattgaatgcctgacgattcacaaagcgatcgataaacaagctgatggtactgccgccctgttgtgccagtacccagaacaatgtcccgacaaacatcaacaatacaatttgccaaagagcacggcggtgttcggggaatttgatcatcatgcgggcaatgatttgtgcggcaatgaggcaaacgatcgccagcaaatatccggaccagtcgttctccagcagcagggtaaaaaatactggggctaaacagagcatcaccactaaccagctccataccggtaaggcaaatttgacgctagtgagcgcttttttatccatactacgcgtggactggaaatgacgatgcccgcttaagaaaatcaacaaaccgataaacatgccgccacccgcaagggcaaagccaacatgccatccataccactgagcagccaggccgcaggcgattggggcggcgatagaaccgatattgcccgcagcatacagcagcgaaaaaccgccatcacgtcgatgatcgttctcgtcgtagagctcgccaagcaaacagctgatgtttgatttgaataaaccgtagccacaaataatgattgccagcgccagatacaggctaaaggttgaatttgtatcaatacccagcaccacatggccaagggtcattaacagcgcgccggcaatcactgcagtgcggttgccgagcaggcggtcggcaagccagccgccgagaataggggtaacgtaaaccagagaagcatatgcgctgaacaggctgatggcatggttatcatcaaaaccaagctgatgggtgagatagagaatgagtaaggcacgcatgccgtaaaaactgaagtactcccagatttggatcgccacgatatagtatatcgcgcgcggctgtgagggtgttttcatgtgttctccttatgagcaaaaaagggaagtggcaagccacttcccttgtacgagctaattattttttgctttcttctttcaataccttaacggtatagcggccatcagcctggcggtatgcaccgtgaatatcggtttcaaagcccggatagtgagcgccgatttcacacagcatctgcaggaactccagaaccggacggctttcttcggtgatcatttcacccggcattaccagaggaactcccggcggatacggaaggatcatattggcgttaatacgaccgaccatttcgtcgaggtaaacttcttcggtcataccgtgcagctctttctggaatgcagcatacggagtcattaccatcgtcggcagcacttcaaatgcgcgatacatcagatccggcagattgtggtgaacaatcagtttgtggatattctgagccagttcctgaatacgcatgttttcatagaattcaggatcttcacgatacagagacggcagcatgtttttcacacgcaggttcaggtcgaacgcacgtttgaagtcagtcagagcacgcagcaggctcagtgctttggtcttatcgataccgatgctgaacaggaacagcaggttatacggaccggttttctcaacaacgatgccatgttcgtcgaggtatttcgccacgatgctggccggaataccaaagtcgctcatggtgccgtctttttccatccccggagtcagcagggtgactttgatcgggtcaagatacatgtgctcgttatcgatgtttttgaagccgtgccaggtgctgtcagaacgcagcggccagcattcagtcgtatcgatatgatccggctgccatacatcaaagaaccagccatcagattccgttctcagacgtttgatctctttacggaatttgatcgcacgttcaatggaaccgttgatcagacgcttacctgcattgcctttcatcatcgccgcagcggtttcagtggacgccacgataccgtagtgcggagaagtggtggtgtgcatcatgtaggcttcgttaaaggtttcttcgtttacgtcacctttaacgtggatcatggaagcctgagagaacgccgccagcagtttgtgagtggactgggtttcgtaaatcactttcccttctacacggccaccgctcataccgcatttaccttcgtaaatcggtgagaagttggtgtaaggcacccacgcggagtcaaagtggatggatttcacatccagtgttttcttgatgaagtcggtgttgtacagcagaccatcataggtagagttggtaattacagcatgtaccggccaggttgcgtttggtgtttctttcacgcgcttagcaatggtagcgtgctggaattcactctgtgggataccaccaagaataccgtaagcgttacgggtcgggcggaaatagattggcgtaacatcgctcatcatcatcaggtgggtcagcgatttgtggcagttacggtcaatcagaatggtgctgcctgccggagcagagtacataccaacaattttgttcgcagtggaagtaccgttggtcaccatgtagctgcggtctgcgttaaagacgcgagcgatatactgttctgcttctttgtgtggaccactgtgatccagcagagaacccagttcagatactgaaatggaaatatcagatttcatggtattcggaccaaagaaatcatagaacaggctacctaccgggcttttctggaatgcagtaccgcccatgtgaccaggagtacagaaagtatatttaccttcacgaacatatttaaacagtgctttagtcagcggaggcagaatagtgttgatatattcgtcagtggtctgcttgatcttgttagcaatatcttcagcagcacccagcgcatattcaaagaagctaatctgtaaacgcaggtcattcaggcttacatcgagagtggaatacgtattagcgaacgcgtacaacggcaggttctcgttcattttgctaatttcttcgcacagctcgagattatatttatcccagtcaaaaataacgccncacagacgcgcattgttttcgatcagttttaataagtcgtcacggtcgttcgggtaaacaatctggaagttcagacgttcaagcgcgcgatgaagttcacggatgggttcttctttaaaataaacccccatgtgattcaatattgcaataacgttcatagtcatatctccaggtaaaaaaggcccctcccaacacatgggacaaaatgaaaggaggagcctcggaaaatacttttaattaatgtgcgttagacgcggtgtggttatccattgagtggctctggcgctcgtgcattttgcgagcgtagaacatcaggataatcaggctgacgatgaaggtacctgccagctcgaaggagcttgcgcccatcagcgcgatgaagcagaacacgcaacccagtacagagcagatcaggctgacaaagttgcggatgttaacgccttcaaaacgaatcaggtcaacgcaagagtagaagtacggcagcatagtcagcagtactgcgataccggtcagttcaccgaacaggtcagatgctttaccaccggcagagttcatcagagtgatgaggatcatcagggcagtcattttcactgcagccagcagcagaccttttttcggaataccgttgctgtcgacttcaccataaactttcgggaagttaccgtcgttagcggcacgtacacctgcctggcctaccaacatcatccaggagcccagagaagtcaggcacgcaaaggcggtgaatgcagaaaccagcggcgcagcccagttaccgaggatagttgaagcactgattgcaaacggagcaccggaagccgccattacagaagacggatacataccggaaagcacctgagtcgcagcgatgtaaacaatacctgntaaaccagtacccagcatggttgccagcggaacggtacgtttcgggtttttaaccataccagtacttacagctgcggattcaacacccacgaaggcccacaggcagagcagaatacttttaatgatcgcatgaccatcagtggtatccgcagtattccagttagctgcataagttgccgcatcaaaccaatgccagccaacaatagcagtcatcaccacaggaataagaaccagcaccagaccaatagtggttaaacggcttacccaggtaccgccgagcatatttacaaaggtaaatacccagacgatagcaatacaggcgatacccgccggaacaggatcatttaatactgggaagaaggtggaaagataagatacagcggtaataccaatcgccaggttaccaatccagttagcatggtaataaagaacacctgtctgaaaaccaaatgcaggagaaatttctccggcataagcaattgggccaccttgttgcgggttttttgttgccagtcgggcatatacatacgccagcgacattgcaccaataatagagataatccaaccccagatagcaataccaccgatacttgctaggttcgcaggtaataatgcaataccgctccccatcatattaccggcaacaacaccggtacaggcaaatagcccgatcttcttggcagaactcatgctcttctcctaatttcatttttgaatttggagtccgggtcatgatgtataactatttcctgaccagaccaaactggcgctaagattactcacgaaaaaaggattaatcctaaagattaggtgaaataacacaaaagtttctgtaagtgagaacttgaggttttttattaacacatcaggatcgcaagttgatatcatgaaaagataaacattcaatgtttacaatagattgcgtgacgtcttctggttaaatttatgtaa

SEQ ID NO: 1671 - DNA, 13593 bp, Escherichia coli
  Strain O55:H7
  modified_base (6036)..(6036): a, c, g or t
  modified_base (6307)..(6307): a, c, g or t
  modified_base (7403)..(7403): a, c, g or t
  modified_base (7867)..(7867): a, c, g or t
  modified_base (11191)..(11191): a, c, g or t
  modified_base (12324)..(12324): a, c, g or t
  modified_base (12421)..(12421): a, c, g or t
  modified_base (12949)..(12949): a, c, g or t
  modified_base (13091)..(13091): a, c, g or t
aattgccgcaacatattataccaacaggaacatacaaaaactcaacaacaaatattcccgagcatgaatcaacccgggggttacttattctgaagcgagaaatttgtcgagataaggtacaacataaggaacagaagtctggaatataccattttcaatccagtaaagggtgtttgcccctgggcgtaaattaaaggcggtgagatatgcatcagccgcttcccggttcatccccttcatttcataaaccttgccaagcaatacataatttagccaggacatttcaagatcaatgccagtatttatcgcctggtaagactcatctgttttaccttttaccagagcactgaccgcttttatttgatatataatggacaggttattcaattccggtagtgtaacaatgttatctatttctgtgttcagtgctgctaattgtttttcatctaaaggatgttgagaatggcgcacgatatcaactaatgctttttctgctctcgcgtaggtaaattctggggatgattgaacaatctcacctaataattcactggcacggttcaatgatttatcatcgccatgcagtaaataatcatgtgcctgataaaaattagttaataacgcaccacgatgaggcaaaatttgctggagcgtctcctgcattcgttgtggccacggttggtttaacgcttttgataaactctccagtaaatcattttgaatcgccagctgattaccgttagtgatgacataacgtttatccagcatggttgaaccatctgcattgtctaccaattttatcgacataaagcattgttgagcacggtattggcgctgattaacaaacgcaatagataatgttttaccggaactgctcggttcatcaatgttgtagttgattttgtcatgcaccataaaggtggagaaggtgttaagtgatgtcgccaccaaatcacccacgcctatcgcgtaagagagctgatacggggaactccagctgttacaacttttatttaccatattaatgtcaatatcgcgtggattgagcaaaatacgcgatttgctcatcggaagacgtgtatcaagacttgaaaacgctaccagtgctacacagatacctaaggacaacaggaaaaaaaaccatacccaaaaggtagtgaatcgtttgcttttaactggggattgttcaggtggcgttgcggtgttttgaatgttaagactgtgggagggagaatctgtggcaggaaccgcctctggtatagggggaggcgaagatagcattatttcctctccctcttcttcgctgtaccagataaccggcaccattaatttatagccgcgctttggtactgtagcgatatagacaggactatcttcatcattatcttttaatgacttacgtagttctgagatactctgcgtcacaacgtgattggtgacaatacttctcttccagacattatcgataagttcatccctgctaagtacttcgccactgtgttgagcaaagaaaaccagaaggtcgattaatctcggctcaagggtaagttgacgcccattgcggctaatttggtttatggacggagtaacaagccattcgccaacgcgaactacaggttgttgcataatagaaactcattcgaaaagggaatgatgcaatgataattgccacaacctatttttaccatctatagatgggtttatttacatattattggtgaatgcaagacgttatttttaccagccataaacttcttgattacatggtattacgaaaggattttactgagaaccagaagtaatattccttaccatcaaaattcatcatctttgccaaagaaaaatgttcagaaaataatccatggaaaattgtccggagcgcttactattttaatggattgttagtctttgcatgagcaagcggactgatacatttctctttgttctcattcagaaaatctcatcagtcggcgttcagaccgatgttgcgctttatggatgcgttacgctcctgatgacgtcatttgacgttcaacagcatcacggggccgcacgacatttcacgttagttagtgctatagctcaggaacaaattttcccgaattgggatatgcccgcaaattgctggtgatgtggggagaatcgggttgagttcggtagaattgatttggaggcagaacacttaaatcgtggtgtcctgaaacgaaaaacggacctccgtggaggtccgtttatatgaatttggtgcccggactcggaatcgaaccaaggacacggggattttcaatcccctgctctaccgactgagctatccgggcaacggggcgcattaaaccgtaatctgcacatctcgtcaacctaatttcagtaaaagcgattcaactgcttaagattgcggcaaatcgcttcttttctgtgtttctgtcaggtcagtgcaccaccctggcggcagcgggcgaagcgcaggatatcttccgccagccgatgtgcggtgttgacatccgcctggctacgattcaccagcattcggcttaaacagccttccagcaccagttccatctgctttgctaccatcgccggatcgtcaacttccagcgtggttaacagttcgtgggtgaaatcgtaggccgcgcttttttgctgatcggccagttgatgaatagggtggccaggatcgggataaaacgtacaggcagcgataaacagacagcccggatagcggttgtttttaacgcactccgataacgcctgataacgtgccagcagcttttgttcggcggtttgcgtttcgtccagcatcagctgacgacgccagacatctatctgttggctaagataacgcagcgcatcgtagaggattgcctctttgtctggccagaagcggcgtagctcgtccagtggataatccacacgttcagcaaccatctccagcgtggtgttggcaatcccttgtaattctaataatttcagggcttctcccagtacatcttcacgttgcacgctattttcctccgtctttcccactgcaagtgtcgttcacggttggcgatcgcgcaaatgtgcgctgaaggtttcagcatccataaagcccgtgacgcgtgcttgtggatgctcctggccttgtccgtcaaaaaagagaattgtcggtaggccaaggacattaagatgctttaacagcgccacatcttgtgcgtcgttggcagtgacgttggcctgaagtaataccgtgtctgctaacgctttttgcacctgcgggtcgctgaaggtgtatttctcaaactctttacaggcgacgcaccagtcggcataaagatctaacatcaccggtttgcctttggcttcaacgagcgcctgatttaactcatctaccgttttgatttgtgtaaagttgagatgcgtctgagtttgcgcggtatgcgtcgcaccaaatgcccaatcctgaagtgggcgcacgctaaccaatgccgctgcaagcaggattatttgcaccacgcgcatccagccgcgtttggcctgtaggctggtgataaaggcccagccaaagaatgcgacacccagcgccgaccacaagcgtaatccccatacatcaccaatcactcgctccagcaggaagaccggcagtgcgaggatcacaaaaccaaacgcggttttgacttgttccatccacgggccgcttttcggcagcaagcggttaccaaagacggtaattagcatcagcggcaggcccatgcccaacgcatagagataaagcgtgccgccgcccagccacatgttcccgctttgggcgatatacagcagaatcgcgctaagcggtgcggtggtgcatggtgaacagatcagtccggcaatcgtccccataataaacactccgccgggtgagccgccctgttggcgattgctcatcagcgtgaggcgcgtttgcagcgaggaggggagttgtagagtaaacaagccaaacattgacatcgccagcaaggtaaagacgatggcgaggccaatgagcacgtatgggtgctgtagcgccgcctggaactgtaaccctgcggcggcaactaccagacccagcgccgtgtaagtcagtgccatcccctgcacataaataaaggtcagcaacaatgctctggcagtggagagccgctgtttaccacccagcacgatgccagaaatcagtgggtacattggcagcacgcatggcgtaaaggcgataccaataccgatcaacaacgcccagagcgcggaaaagggcaattgcgcggtgggctgctcttgctgcggaacagacacaggctgtgacgctgcgttgttggcgaccacttcgcttaacggaacggttttggtttctggcggataacagaaaccggcatcagcacagccctggtaggtgacagttaacgtcgctcccgcactcgcctggttgatggttacgggaagcgtcagccgatcgcggtaaatctcgcttttgccgtaaaactcatcttcatgccagacgccttgcggcagctgcacgtcggcaattttcgcgtgttccggcgtaatgcggatctgtttacggtagaggtagtaaccgtctttgatctgccaggtcagattaaggtcatgttggttttgctgaaaatcaaaagcaaaggcttgatccgcggggacaaattgtgaacgtcccggcgcgtcgaataatccggcaaaaacggaagtgctgcaaagtagcaggatcagcgtaaagatgcgttgagccatgagaggtaatctgtgtctccgtgtgtaacaggtaaaaccagaagttccggggtttgatatggatgatgagacttcaggcattccagcagtgcctgctggtgagatacggtagtttttaaaatcatctgcacttcgtattcttgctccagcttaccttcccagtaatagagagaggtagcgccggggatcaaggtcgcgcaggccgccagtttttccgccagcactttggcggctaaatcctgggctgtcgcttcatccggtgcggtacatagcaccacgacagacgcggtattcgaacttttttcatcaagcataaacacctcgcaagaacagatggaaccgcaagagagaggtcactatacaacggacggggaaaggatgttagtcggcgagaaagaaagcggggcgtgaacgccccgcgattggtcattacagcatgaagctacccagcacgaagccgaagcaaacggccagggcaacacccagagtacccgggatgaagaacggatggttgaagacgaatttaccgatacgggtagtacccgtgtcatccatctgtaccgcagcaaccagcgtcgggtaggtcggcagaatgaacagaccagacaccgcagcgaaagaagcaacagcggtcagcggagaaacgttcagtgccagagccatcggcatcagtgcttttgcggttgcagcctgagagtacagcagagcagaagcaaagaagaagatgacggccagcagccacggatgaccctgaatcacttcaccagcggtatctttgatccagtcgatgttgttggaaacgaaagtatcgcccagccacgcaacacccaggatacaaatacaggcgctcatacctgctttgaaggtgctggagttgaggatgttgtcggtatcgactttacagataacggtggtcagagttgcaacactgagcatgatgatcaggattgcgttggtggtgttcatcagcggtttttcaaccagacccatgcttgggctgttgatgattgcatagataaccacgccaactacgcccagcaggaacagccagacggacgtttttgcaccggatttgatttcaatctgcttttcaccgcgcagttcaaccaggccctcttccagacgcttgcgataaatcggatcgtcagagagtttggagttgaacagcatagtgaccaggaaggacatcaccagaaccgccagcagggtggacgggatgaccacggagagcagatggaggtagctgatgccatgaccttccatcacggaagacatgtaaaccactgccgctgagattggcgatgnggtgatcgcaatctgcgcggataccactgcagtagacagcggacggcaaggtttaacgccttgttccttcgcaacttcagcgataactggcagtgtcgccagagagatgttgccagtaccagcaaagatagtcaggaaataggtcacgatcggtgcgaggatcgtgatgtatttcgggttacggcgcagcagcttttctgtctgatgaaccagatagtccagaccgccagcaacctgcatggcagaaatagcggcgataaccgccatgatnatggaaatgacatcgaacgggatgttaccgggtttaacgccaatagcggcaagaaccagcacccccaatccgcctgcaaaaccaatacctattccccccaatctggcgcccaagaagatcgccagcaaaactatgatgagttctacaactagcatattagccttccttgttttttaacaagttgatattagattgttatttttaagttactgctcacaagaaaaaaggcacgtcatctgacgtgccttttttatttgtactaccctgtacgattactgttcgctttcatcagtatagcgttttgctttgtaagccgggtgcatcagattctgtacggagaaaatatcgtcaagttccgcttcagtcaacagaccgcgttccagaacgacttcacgtacactcttaccggtttcggcacagattttacccacgatgtcaccgttgtggtgaccgatgaacgggttcaggtaagtaacgataccgatagagttgtaaacgtaaccttcgcacacttctttgttagcagtgatgccgttaatgcatttttccagcaggttgtagcaagcgttggtcagaatgtgaacggattcgaacatagcctggccaatgaccggctccataacgttcaactgcagctgacctgcttctgctgccatggtaacagtggtgtcgttaccgatgactttgaagcatacctggttaaccacttccggaacaaccgggtttactttagctggcatgatggaagagcccgcctgcagttccggcaggttgatctcgttcaggccggcacgtggaccagaagagagcaagcgcaggtcgttacagattttggacatcttcacagccaggcgtttcagcgctccgtgaaccataacataagcgccgcagtcagaggtcgcttcgatcaggtcttcagccggtacgcatgggaagccagtaacttcagccagttttttcactgccagcggagagtactctttcggcgtgttcagaccagtaccgattgctgttgcgccaaggttaacttccagcagcagttcagcggtacgttggatgtttttcacttcttctttcagcaggatgctgaaagcgnggaattcctgaccgagggtcatcggtactgcgtcctgcagctgggtacgacccattttcaggatgtcctggaattcgaccgctttacgttcaaagccttcacgcaattggttaatcgcatctaccagcttaatcagggaagagtaaactgcgatacggaaaccggtcgggtaggcgtcgttagtggactgacatttgttaacatggtcgttcgggttcaggtactgatattcacctttctggtgacccatcagttccagaccgatattggccagcacttcgttggtgttcatgtttacggaagtacctgcgccgccctggtagacgtctaccgggaactgatccatgcattttccgttgttcaggacttcatcacatgcggcaatgatggcattcgctacacttttaggaatggtttgcagctctttgtttgccatagctgcggcttttttaaccattaccatnccgcgaacaaattcaggaatatcactgattttgttgttgctgatatagaagttttcaatcgctctcagagtgtgaacaccatagtaggcatcagctggaacttccctggtacccaacagatcttcttcgatacgaatgttgtttgacatgtgaaccttctttttcaagctgccaatgatttgctttaaacacacagaatatatgtggtttcgaatgtttttcgaccgacgattatcccctgcatcgaccgaatatccgagatcatatgctgcttgaggatttctaccgtaatctggatcactttaagtgtcggtttttaccccttaattattaatttgtgaaatagatcaccgctttgggattactaccaaaaatagttgcgcaaatatcttgaaattttgctaatgaccacaatataagctgaacgcgattcgcaacccattcaggtagccgggtttaaccggctgctattacaggagaaacctttgcgctggttaccttttattgccattttcctttatgtctatattgagatttcaatctttattcaggttgcccatgtattgggggtattgctgactctcgtgctggttatatttacgtcagttatcggtatgtcactggtacgtaaccagggctttaagaatttcgtgctgatgcagcaaaaaatggcggcgggtgaaaacccagcggcggagatgattaaaagtgtttcgctgatcattgccggtttgctgcttttattaccgggctttttcaccgacttcctcggtcttctgcttttattgccgccggtgcaaaagcatctgacagtgaagttgatgccgcatttgcgcttttctcgcatgccaggcggcggttttagcgccgggaccggtggcggtaatacttttgatggtgagtaccagcgaaaggatgatgaccgcgaccgccttgatcataaagacgatcgccaggattaatgtcgaaacgccggattatgtggttatgccattttccggcgtttttcgttttggcagaaacagccataaccccgccagcatgatcagcgcatagagacttttccagccgaccattgccagtaacagaacgcataacagcccgccaaccaccgccagtagtcgataacgaccttgcaataatttacagcctgccagcatgcataacagataaatcataataaagatgccattggcataaataataagagcgtccagattgatctctaaagcatgaatcaccaacgtgctcaccacgcagcagccgagcaccgcattgagggcattattcgggatatggcgagaagagaggcgtgccaggtagtggtcaggattatgttgcgcctgcgaccagaccaggcgggcgaagctctgtatataaatgttgagactggcaaagcaggccagatagccaattacgcaggcaatccataacgctcctacaccgaacagttgtactacaatttttggaagcgatgctgccgcggccatttgttcaccataggcgtcgaagtgtaagacgactaccgtacagccccagtagactaatcctgccagcagcagaccaatcatcaaagcacgaggaaaatcacgttctggatttttaaattccgaggcaagatgggcaaatgcttccagaccgacaaaacaccagaacatcactgataacgcagcaaataacccggtaagttcgatatttcctggcgcggggaaggggatactcgcaggtttgatatcgcccgcccaccagatagcgacaatcagtgcgacgataagtccggcaataactgtttgtagatttgcactggaactggcaccgcgagtaccgatataccacaccaacgccagcgtaccgagttctgccaacaacagttgccagctatgccagccaaacattgcctggccgaatccggcagcaatttgtagcgcggcaggcaaacccacgggaatgaccgataaaaacagccagccggtgactcgctcaagccgcgaaccaaacgccataccgacgaagtgcgcgacgccgcctgcgctgggatagtggcgacccagaatcgcaaacacaatcgcaatcgggaacactaagataatcaaaacgggccacgcccacaggctgttattgcccgctaccagtgcagctaacgcaggaacggcaaacacgccagtgcctaataatgacgtcgatagcaggccaatgccctgggccagccccagttcttgtttgagtccactcatgggttgatgtccgattgcgcccaaattttgggcaactgcgtagattttcgatggtagcacaatcagattcgcttatgacggcgatgaagaaattgcgatgaaatgtgaggtgaatcagggttttcacccgattttgtgctgatcagaattttttttctttttcccccttgaaggggcgaagcctcatccccatttctctggtcaccagccgggaaaccacgtaagctccggcgtcacccataacagatacggactttctcaaaggagagttatcaatgaatattcgtccattgcatgatcgcgtgatcgtcaagcgtaaagaagttgaaactaaatctgctggcggcatcgttctgaccggctctgcagcggctaaatccacccgcggcgaagtgctggctgtcggcaatggccgtatccttgaaaatggcgaagtgaagccgctggatgtgaaagttggcgacatcgttattttcaacgatggctacggtgtgaaatccgagaagatcgacaatgaagaagtgttgatcatgtccgaaagcgacattctggcaattgttgaagcgtaatcctcgcacgacactgaacatacgaatttaaggaataaagataatggcagctaaagacgtaaaattcggtaacgacgctcgtgtgaaaatgctgcgcggcgtaaacgtactggcagatgcagtgaaagttaccctcggtccgaaaggccgtaacgtagttctggataaatctttcggtgcaccgaccatcaccaaagatggtgtttccgttgctcgtgaaatcgaactggaagacaagttcgaaaacatgggtgcgcagatggtgaaagaagttgcctctaaagcgaacgacgctgcaggcgacggtaccaccactgcaaccgtactggctcaggctatcatcactgaaggtctgaaagctgttgctgcgggcatgaacccgatggacctgaaacgtggtatcgacaaagctgttaccgctgcagttgaagaactgaaagcgctgtccgtaccgtgctctgactctaaagcgattgctcaggttggtactatctccgctaactccgacgaaaccgtaggtnaactgatcgctgaagcgatggacaaagtcggtaaagaaggcgttatcaccgttgaagacggtaccggtctgcaggacgaactggacgtggttgaaggtatgcagttcgaccgtggctacctgtctccttacttcatcaacaagccggaaactggcgcagtagaactggaaagcccgttcatcctgctggctgacaagaaaatctccaacatccgcgaaatgctgccggttctggaagccgttgccaaagcaggcaaaccgctgctgatcatcgctgaagatgtagaaggcgaagcgctggcaactctggttgttaacaccatgcgtggcatcgtgaaagttgctgcagttaaagctccgggcttcggcgatcgtcgtaaagctatgctgcaggatatcgcaaccctgactggcggtaccgtaatctctgaagagatcggtatggagctggaaaaagcaaccctggaagacctgggtcaggctaaacgcgttgtgatcaacaaagacaccaccaccatcatcgatggcgtgggcgaagaagctgcaatccagggccgtgttgctcagatccgtcagcagattgaagaagcaacttctgactacgaccgtgaaaaactgcaggagcgcgtagcgaaactggcaggcggcgttgcagttatcaaagtaggtgctgctaccgaagttgaaatgaaagagaaaaaagcacgcgttgaagacgccctgcacgcgacccgtgctgcggtagaagaaggcgtggttgctggtggtggtgttgcgctgatccgcgtagcgtctaaactggctgacctgcgtggtcagaacgaagaccagaacgtgggtatcaaagttgcactgcgtgcaatggaagctccgctgcgtcagatcgtcctgaactgcggcgaagaaccgtctgttgttgctaacaccgttaaaggcggcgacggcaactacggttacaacgcagcaaccgaagaatacggcaacatgatcgacatgggtatcctggacccaaccaaagtaacccgttctgctctgcagtacgcggcttctgtggctggcctgatgatcaccaccgaatgcatggttaccgacctgccgaaaaacgatgcagctgacttaggcgctgctggcggnatgggcggcatgggtggcatgggcggcatgatgtaattgccctgcacctcgcagaaataaacaaacccccgggcagaaatgtctgggggtttttctnttggccatctttctagtataagattcagacacggacgacgcgagtggcgtccagctcattgattatggggaataacatgcacgtaaaatacttagcagggattgtcggtgccgcgctactgatggcgggttgtagctccagcaacgaattgagtgctgccggtcagagtgtacgcattgtggacgagcagccaggcgcagagtgccagctgattggtactgcgacaggtaagcaaagcaactggctttccgggcaacacggagaagagggcggttctatgcgcggcgcagcaaacgatctgcgcaaccaggcggctgcaatgggcggtaacgtgatttatggcatcagtagcccgtcgcagggaatgttgtccagttttgtcccgacggatagccagattatcggccaggtatataagtgcccgaactgatgtgatggtgacaaacgtataattgccagatgcgcttcgcttatcaggcctacataaggcattgcaactgattgaatgcttgagaatttgtaggccgnataaggcgtttacgccgcatccggcatgaccaacgatcacgttatcagtcatttcaggctggatggctccagcctcgcattagcaaagatgagattatttcgcctgtggtgcagttttgctggtggattgaacacgtaagtnatgcagcgcgcgtaagcattgatcctgggttagcggttgggcgttattcgccgctacggtgcgaacatagacctgacatggcacacccacgagttttttcagtcgtgggctgaaatcaagcattcggcgagtgatcgcctctatttctttacccggcgttgcttcacgcgttttcaccactgcgccgctaaattgttctttgccactttcatctttaaagcggtaaagcaccgccagataatggtcgaacaagttatgtttccattccggttgggaataggtgtcatattccagattgccattttgctggcagtcaacgtcatataacggcaggaaatctaacagtgaggtaatacgtaatgccagttcacgcatttccgcattattaattgcatgaatgattgctcgcgccagcatttcaatctgcaactcattgacgactaactcacatttgctaccgtcatgtagcgttaatacgaaggcatttctcaattaaataatt

SEQ ID NO: 1672 - DNA, 17482 bp, Escherichia coli
  Strain O55:H7
  modified_base (2)..(3): a, c, g or t
  modified_base (649)..(649): a, c, g or t
  modified_base (718)..(718): a, c, g or t
  modified_base (1531)..(1531): a, c, g or t
  modified_base (3404)..(3404): a, c, g or t
  modified_base (4934)..(4934): a, c, g or t
  modified_base (5099)..(5099): a, c, g or t
  modified_base (12319)..(12319): a, c, g or t
  modified_base (14322)..(14325): a, c, g or t
  modified_base (17251)..(17251): a, c, g or t
  modified_base (17267)..(17269): a, c, g or t
  modified_base (17417)..(17417): a, c, g or t
tnnataagccagataaatgggcttggtagtaatagttgttaaaataacataaatagccgtactcactctatataaacagaaaagaaaggttaattattggtgttggttatataaagagtaacaacagcaatgtatatgaataattaaaggttatgtaacgggcaaagattaaacttccctgtttaatcagttactgctggcgtagctggagatccagcggcgttttgctgggttcgccgccaatttctcgcgccagtttcggcaccagatatcccgacaccagtgtcagcaactcacgcataatctgccgtgcttcgtcatcactcaccataaaatgcgccgcgccctgtactttatcgagcacatgcaggtaatacggcatcacgcctgcatcgaacaacgcattactcaggtttgccagcgtttgtgcgttatcgttcacaccacgtaacagaacgctctggttcagcaaagtaacgcccgcccggcgcaacttagccatcgcctgacggaatgtttcatctatctcattggcatggttgatgtgattcaccagcaagatttgcagcgtagaatgtgaaaagcgttcaaccagcgcatctgtgatgcgtgccgggatcacaatcggcagacgactgtgaatccgcanacgtttgatatgcgggatggcttccagttgtgtgagcaaccagtccagctcgtgatctttcgccatcancggatcgccgccggagaaaatcatctcgtccagttccggatgcgcagcaacatactcaagtgcagtttgccagttacgcttgttgccctgattttcggcataggggaagtggcgacggaagcaatagcggcaatttaccgcgcagccgcctttgaccagcaaaagcgcccggttgtggtatttatgcaacaaaccaggcactacgctgtgctgttcttccagcgggtcggtggagaatccgggcgcgacgacaaactcatcttgcgaggtaagtacctgacgcaaaagcggatcgtccggattgcctttctccatgcgatcgataaatgagcggggcacacgcagggcaaacagctttttggcgttgcgtccggccaacagtttttcgtccgcgtctatattcaaaagacgcagaagttcatcaggatcggtcacaacatcggcaagttgcgttaaccaatcttctctggatggggtatttagggttacaatatgcgccattttgtggcttagctaccaattaacaaatttcagagggccttatggcaacgtactatagcaacgattttcgtgctggtcttaaaatcatgttagacggcgaaccttacgcggttgaagcgagtgaattcgtaaaaccgggtaaaggccaggcatttgctcgcgttaaactgcgtcgtctgctgaccggtactcgcgtagaaaaaaccttcaaatctactgattccgctgaaggcgctgatgttgtcgatatgaacctgacttacctgtacaacgacggtgagttctggcacttcatgaacaacgaaactttcnagcagctgtctgctgacgcaaaagcaattggcgacaacgctaaatggctgctggatcaggcagagtgtatcgtaactctgtggaatggtcagccgatctccgttactccgccgaacttcgttgaactggaaatcgttgataccgatccgggcctgaaaggtgataccgcaggtactggcggcaaaccggctaccctgtctactggcgctgtggttaaagttccgctgttcgtacaaatcggcgaagtcatcaaagtggatacccgctctggtgaatacgtctctcgcgtgaagtaatgcggttgtggtgcggcctgcaggctgcaccatcacttattcaggtcagagatgatgaaacgccttatcgttcttgttttgcttgccagcacgctgctcacgggctgtaacaccgctcgcggtttcggcgaagacatcaaacatctcggcaactccatctcccgcgctgccagctaatttttcttctcttccgaaaaatcatcagatttccatcatttttggcgatgttgtctattattaatttgctataggcaaacataaataacattacctaaaaggaagacgttatggtgaagaagacaattgcagcgatcttttctgttctggtgctttcaacagtattaactgcctgcaacaccacgcgtggcgttggtgaagacatttctgatggcggtaacgcgatttctggtgcagcaacgaaagcgcagcaataagcaataacggtacgacagctgtgtcgtgccgtttgttttttctgcgatagtcacaaaggtaatagttgaaattcccctgccacctggcaaaatatccgttcaaccatcagctttgcaggacgacctgcaaacgcgtcttttcaccggggacggccccaattctccggagcctgatatgtcctggattatcttagttattgctggtctgctggaagtggtatgggccgtaggcctgaaatatacccacggctttagtcgtttgacgccgagtgttattaccgtgacggcgatgattgtcagtatggcgctacttgcctgggcgatgaaatcgttaccagtagggacggcttatgccgtgtggacgggtattggcgcagtcggcgcggccatcaccggcattgtgctgctcggtgagtccgctaacccgatgcgtctggcgagtctggcgttaatcgtattggggattattggtctgaaactcagcactcactaactaccgggctgctgtacccaaataaacttactgacatcaaacccttcccgggtcgcgactgccagcatctcctgtttcacttcgtcagaaatggttggcgtgcgggagagtatccacaggtagtcgcggtccggtccgcaaaccagcgcatggcggtattcccgatcgagtgcaataacgttataaccgccatagaaaggaccaaagaatgacactttcagcgcagcgcgagttggtgcgccggtaaagtacgctttcccttcactctgctgccacattcctctgtcagggttatagcctttattaatgacattcaggccgccgtcatcacgcaggctgtatgttgcggtgactttttccagtccacgttcaaagcggtgatcaaaacgggcaatctcataccaggtaccgagatagcgtttagcgtcgaaattattcactacggtcacgccacgcggcggcgtaggagaactgcaggcaacgaccagaaatgcagctgtcgctgcggcaacgagagggagcaggcgcataaatgtttccttactggttttttctaagtgtagatgacagcaaggaaaagcgcagaaaaggtccgaaaattcggacccgatgaaattttactgtagagcgttgagaatctgccaggcggnggcgactctcgctggattgggatagtttttgttagccagcatcacgatacccagctctttttctggaataaacgcgacatagctaccaaatccgccggtcgcccccgttttatgcacccatgatgctcgtactgcaggagttggaggcgtaatcgcttttacggggcgtgctgccagtgcaattttattgtcactgccgttaacgatgatgtcaggatttaccggccagtccagcatttcccagcccagaccctgatacatatcgccggtttgccagtagcgagattgtgccagttgtatcccttgctgaagtgttttgtcgttgatatcacggggattcatattgcttcgtacccagcaggccatatcttcaatggtcgacttcacaccataagtttcagcatctaacgcccctggcgaaacatgaactgccttgccttcgcgatatccccaggcgtaattcttttcttctgcgggcggtacattaatccacgtatggttgagtttgagtggctggaagacacgagtttgcatcgcctgctcaaaactcaaaccagacggcttcacagccagtgcgccgaacaaaccgatactggagttggcatacagacgttgtgttcctagagcccatgcaggctgccagttttgatagaagcgcagcaagtcgcttgaggatttcacttcatccggcacctgcaatggcaggccgccagcagtgtaggttgcgagatgtaatagtgtgatcccattccactgtttagcggtaagttcaggccagtattttgttgcgggatcgcttaacttgatttcccctcgagcaatagcgtcgccaccaagcacgcccgtaaatgttttgctgaccgaacctaactcaaacaacgtttgctgtgtgacgggctgctttttggcgatgtccgcatacccccaggtaaagtaataaggtttaccctgataaattaccgccaccgccataccggggatcttttgttgctctataagcggggtaattgtgcgatgcacaatatcgttgatttgttgaggggcagcaaatgtggagcaagaggcggtaattaataaggcgcagagcgtcgttttgaacatagggtctggtttccatacaaaacggcccgccataggcgggccggatttacattggcgatgcgttagattgtaacgacaccaatcagcgtgacaactgtcaggatagcagccagaccgtagaaaacccatttgcccgcaggtacgtggattttcagatcgtgcatcgcgtggtgcatacggtgtaaaccacaccacagcggcagaacgatcatcaggaacaggaatacgcgaccaatgaagctctgcgcgaacgccagaacgcgctcgtagctcagtgcatcacccggaaacagccccagcggcagcagaatacccaccagcaggatcatcaccggcgcaataattgcgctccacataccaccggccccgaagaggccccagaataccggttcgtcagaacgctttggatttggattaatcatctcaggntccttaccagtacagggcaacaaacaggattacgatggtggcaaccacagttaccgcccagagacttttgataattggctctggtcccattttttcgtcttttacaatgatattggccgctttcggtgccagttcaaaccaggttttggtgtgcagcagagctgncgccagagtgatcaggttaatgatcacaataaccgggttttgtaaaaagtcgacgaatcccgcccaggcttccgggccatttttcagggcaaacagcccgaaaatcagttcaatgctgaaccacacagccggaaccgccgtgccttcgcgcagcatgtaaaagcgataaaacggcaattttttccaccaggtggacgtcattggccgtacatacggtttacgtttagtcgtcatgttgcactccttagcgtggtttcagggtcgcgataagaaagtctttcgaactttctactttgccctgctgaatggccgcagccggatcgacgtgtttcgggcagacttcggagcagtagcccacgaaagtacagctccatacgccgttctggctgttcaactgcgccatacgctccttcttaccgtggtcgcggctatcttcgttataacgatgcgctagcgtaatggcagccggaccgatgaactctgggttcaggccaaactgcgggcacgcggcgtagcacagaccacagttgatgcaaccggagaactggtgatacttcgccatctgcgccggggtctggatgttagtaccctgatccgcggtgcgggagttgccgatgatgtacggtttgatcgcttccagactttcgatgaagtgggtcatatcgaccaccagatcgcgttcaatcgggaagttagctaacgcttcaaccttcataccgtcggtgtaatcacgcaggaaggttttacatgccagttttggcacgttgttaaccatcatgccgcaggaaccacaaatcgccatacggcaggaccagcggtagctcaggtccggtgccaggttgtctttgatgtagcccagcgcatccagtaatgaggtagttgcgtcataaggcacttcatagaatgcgctatgcggtgcggtatcgacttccgggttatagcgcaccacctcaattttcaggtttttcatctcagccattcgccttctccttcttattggctgcttccgccttatcggctgcatccgcttcgccaccgtaaacgcgtttagctggcggtagcgtagtaatcttcacgtcgctgtactccaggcgagtcgtgccatcagcatcgcggaaggcgagggtgtgtttgaggaagttgacgtcgtcacgctcggtgcaaccttcgtccagacgctggtgtgcgccgcgggactctttacgtgccattgcggagtgcgccatacattcagcaacgttcagaccgtggcccagttcaatggtgtagagcaggtcggtgttgaacacgctggaagtgtcggtgatgcgcacgcgcttgaagcgttcctgcagctctgccagcttgtcgatggttttctgcatcagttccggcgtacggtagataccgcaaccttcttccatagccaggcccatttcgtcgcggatcttcgcccagttttcgccgccatcctggttaaccagatctttcagacgttgttcaacgccagctgcctgcgcttcaattgccgcttcgttgccattaccggcagttgctgcacgctctgtcgcttgttcaccggccagacggccgaagaccaccagttccgccagggagttggagcccagacggtttgcaccgtgcagaccaacagaggaacattcacccacggcgaacagacctttaatgcgggtttcacagttctgatcggtttcgataccgcccatggtgtagtgtgcggtcggacgtaccggaatcggttctttaaccggatcgacgccaacgtacgctttcgccagttcgcagatgaacggcagacgttcatgcagttttttctcgccgaggtgacgcaggtcgagataaaccacatcaccacgcggcgtggagatggtgttgcctttacgccattcgtgccagaaggcctgagaaactttgtcgcgtggacccagttccatatatttgtttttcggctcgcccagcggagtttccgggcccatgccgtaatcttgcagataacggtagccatttttgttgaccagaataccgccttcaccgcggcaaccttcggtcatcaggataccggaacctggcagaccggttgggtgatactgaacgaattccatgtcacgcagcggaacgccgtggcttagcgccatacccataccgtcaccggtaacgatgccgccgttggtgttgtaacgataaacgcgacccgcaccgccagtagccataacgaccgcgttagcacggatctgcaccagcgtgccttccatcatgttcattgctaccaggccgcgaacatgaccatcatcaaccagaatatccagcacgaaatgttcgtcaaaacgctggatctgcgggaattgcagagaggtctggaacagcgtgtgcagcatatggaagccggtcttatcggcggcgaaccaggtacgctcgattttcatgccgccgaagcgacgtacgttgacgctaccatccgggcgacggctccatgggcacccccacagttccagttgggtcatttcggttgggcagtggtggacgaaataatccacgacatcctgctcacacaaccagtcgccacccgctactgtatcgtgaaagtgatattcgaagctgtcatgctcctgcgcgacagcggcggagcccccttctgcagcaacggtatggctacgcatcgggtatacttttgagattagtgcgatttttgcatttggatttgcctgcgcggcagcaattgcagcacgtaatcccgcgccaccggcgcctacaatggcaagatcggcttgaaaggtttgcacgacattcctccagattgtttttatcccacagccccgtacttcagggtaagtgcctgaaagttacggtctgcgaacgctattccactgctcctttataggtacaacagtatagtctgatggataagtctgaaatttgacgagatcgatttttttagtgcgcaagagggctaaattatcactgaagatgattaatttaattactaaaccatcagatcgtgctttttttagtcactgcccaccgttgttttattcctgcgtaaaatttgtctcgccgtcgcgttgcgagtagacttcgtgcccttgtcaaaaactggagatttaactatgagcgaaacggcatcctggcagccgagcgcatccattcctaacttattaaaacgcgcggcgattatggcggagatccgtcgtttctttgccgatcgtggagtgctggaggtggagacgccttgtatgagccaggcgacggtaaccgatattcatttggtcccgtttgagacacgtttcgttggccccgggcattcgcaggggatgaatctctggttaatgaccagcccggaataccatatgaaacgcctgctggttgccggttgcgggccggtattccagctgtgccgcagtttccgtaatgaagagatggggcgttatcacaaccctgagttcactatgcttgagtggtatcgaccgcactatgatatgtaccggttgatgaacgaggtggacgatctcttacaacaggtgctggactgcccggcagcagaaagcctttcttatcaacaagctttcttgcgttatctggaaattgacccgctctctgccgacaaaacgcaactgcgggaagtggcagcgaaactggatttgagcaatgttgctgataccgaagaagaccgcgacacgttgctacaattgctgtttacctttggcgtagaaccaaatattggtaaagaaaaaccgacctttgtgtaccactttccagccagccaggcatcactggcgcaaatcagtaccgaagatcatcgggtcgctgaacgctttgaggtttattataaaggtattgagctggcgaatggtttccatgaattgacggatgcccgtgagcagcaacaacgctttgaacaagataaccgtaagcgcgcggcgcgcggtttgccgcagcaccccattgatcagaatctgattgaagccttgaaagtcggtatgcctgactgttccggcgtggcattaggtgttgatcgtctggtgatgttggcgctgggcgcggagacactggctgaagtcatcgcctttagcgttgaccgggcataattctgaaaaattactgaattaacagcgaagaatggcgtgataagcgccattctgtagcatatgttttcatttttccgctaaaggccacaatttaagactggatatttgatatcatccaggtatcaattctgtattggtttttacgctgcccgctcaatgttgggcagtgcagttcagtgggcgcgttttatacacgcgctgaaatgaaggatggtttcatgcctcacacgataaaaaagatgagtctgataggactcatattgatgatctttacttccgtatttggatttgccaatagcccatcggcttattacttaatgggttatagtgcgattcccttttatatattttctgcattgttattctttattccattcgccttaatgatggctgaaatgggagctgcttatcgcaaagaagaaggcggtatctattcctggatgaataatagtgtcggaccacgttttgccttcattggtacgtttatgtggttttcctcttatatcatctggatggtgagcacctccgcgaaagtttgggtaccgttctcaacattcctctatggtagcgacatgacccagcactggcgtattgccggactggagcctacgcaggtggttggtctgctggcagtggcatggatgattctggtcaccgtcgttgcttcaaaggggattaataaaattgcccgcattactgcggtgggcggtattgcagtaatgtgtctgaatttagtattgctgttagtaagcattactattttgttattaaatggtgggcatttcgcgcaggatattaatttccttgcatcaccgaacccaggttatcagtccggtctggcaatgctatcgtttgtggtatttgctatttttgcctatggcggaattgaagcggttggtggtctggtcgataaaacggaaaatccagaaaagaactttgccaaaggtattgtttttgccgctattgttatttcaatcggttattcgctggcaatatttttatggggcgtcagcacaaactggcagcaggtattaagtaatggttccgttaacctcggcaatattacctatgtgctgatgaagagcctcggggtgacgctgggtaacgcactgcatttgtcacctgaagcgtcattgtcgctgggcgtatggtttgcgcgtattaccggactttcgatgttcctcgcttataccggtgcgttctttacgctttgctattcaccgctgaaagccatcatccaggggacgccgaaagcgttgtggccggaaccgatgacgcgcctgaatgcgatggggatgccgtctatcgccatgtggatgcagtgcgggttggttactgtcttcatcctgctggtttcgtttggtggcggtaccgcatcggcgttctttaacaagctgacgctgatggcgaacgtgtctatgacgcttccttacctgttcctcgcgctggctttcccattctttaaagcacgtcaggatctcgacagaccatttgtgattttcaaaacgcgtatgtcggcaatgattgcgacggtggttgtcgttctggtggtgacatttgcgaacgtcttcaccattattcagcctgtggttgaagccggagactgggacagcacattgtggatgattggcggccctgtcttcttctcgctgttagcgatggcgatttaccagaactattgcagtcgcatggcgaataaacctgagttagctctcgactgatcatatgaaatcctgcaactcatcgtctctccggcgatgagttgtcaggaagtaatgcgtatggatgatactctccagggccggtgataactgaagatgatgttaagctgctaaatgagccacgttgacatcatttggcagcttcatgcattacaaacttcccgcctgacgacctttgcccgcagacgtcagcgttctccccgtttgtttaccgttgaggctttccagacgcatctggaagggcgggaatggcatatcgataccgtgggcatggaagccagccagaatcagctggtggatctcatggcgtagcggcatacggtgacccatctcagcggcgtaaatacgcagctcgaaaatctgaatcccctgttgcagatccaccaggaagacttccggtgccgggttgtcgatcaccagcgagcagcgacgcgctgcggtgagcaggatttccgtcacttcttcactgttggcatcggcaggggccggaatcgtcaacaccacgcgcgtgaccgagtcagagagcgaccagttgataaactgctcggtaataaacgccttgttcggcacgattatctctttacggtcccagtcgctgatggtggttgcgcgggtattaattttcgtcacgctaccagtaagatcgcgaattgtcaccgtatcgccaatgcgaatcggtttttcgaacaggatgatcaggccagagataaagttggcgaaaatttcctgcaaaccaaaaccgagaccaacaccgagcgcggcgaccagccactgcaatttcgaccactcaataccaatcatcgagaagccgaccagcccgccaatcagcatcagcagatatttggtgatggtggtgatggcgtagccggtacccggcgttaaatccaggtgctgcaaaatcgccagttccagcagcgcgggcagattgcgcaccagctgcgtggtgatgataaacaccagaatggcaatcagcaccgcaccgagggtaatcggctccagactttctacgccctgtaccgtggaggtgacatcccacagcgaaatattttcgaggaagccgaaagcggaatggatttctgaccacagcacaatgaccgaaagcagggcgatcaacatcaaaattgagcgcactagccgcaaggactgcgcactgatggcatcgagatcgacttcgctttcatcgacttcaattgccccttccgggctactgtgatgatgtgcttcctcttcgccacgcgcacgttgcgctaacatctctgcccggcgatgcttcgcccggtcaaacgccagcctgcgtcgttggatcagcatccagcggcggataacgtgataaaccaccagtagcaggaaccagatggcaaccgaggtttcaagcctcgctaacagcgcctgtgccgttgccagataacccaccgcngacgccagaatggcaaccagtggcgcgccaatcatcatgttccacaacatatggttggtaatattgtcgccgctgccttctttgttgagatacagcgggatcccggcctttttcaggctgagggtgaccaccgccagcgcaccgcaaatgaggataaagcaaagccgtcccagcgaaccggaaaattcgcggtcgtcgaggttatcgaacatcatcagcgccataatcagtggcacaataagcccgatgctcatcaggtagtagcgcatcccacgagaaacacgttcgcgcggccagccaaaatgagcgataaacaagccgttcgggcgggcaaaggtagcgcaaatcatcactacccacagcagcggcacggtggctgtgacgccatcaccaatcgcgaccgccagcggataaggccacgcctcgcgcaagccgtaacccagcgtcatccacagcaccggcagcggtgacgcgacgagaatcgaccagaaaagagtgcgcaacgtcagccagaagtgatcctgagtcactttgccgactttcgccgccgaacgttcaagaaaacgggtgaaatagcggcgcgagtaaatactgcaaccgaccagaatcaacgcgccaaacagcggcaaaatcgtctctttgctggtcagcatcatcacactggctttgcccaactgactgaaggtgtccagcgaaatgagacgacgcagatcctgggcgatttccagcggccaggcgatggtcatcgggcgcacgtcagaggtccagaacagatagcggtgggtcgcttcgttcacttctttcagcgcatcttccagttgcccgttggagactttcagcttggtcagttccagcagtagcgtatcgccaccctgcaacaatgagttcagcaactcacgctgagtgcgtagctgtgcttccagaatacggttttgctcagcggtcagcggctgaccgtcggcctgatgaatttgccgtagcagcggctgtttattaagcagatcctcataacgtaaccgttgcacacgcaactgcgccatttcggtatcaagctgttgtggtttcggcatttccggcagccgtgccacctgcgcccgcaacgcttcaccgagcagattggacgatcccagccattgcgactgttcacgcagcgtattcaacgcctgccggacctgtaacgtctggctggcagcctgacgctgttgcgaggcaacgagatccatccgctgcgcctgttgattcagcgccgccgatagttcgcggttaattttgaattgcgcgacgatatctttcggcaaatcggcactgttttctgctagtaattcggtactttccagcgcccgctctgcctcaagctggcgttggctgttcaattgattacgcaaggcctgcaaatacgcatccagttgctggctctctttttcagccagctcagagcgcaagcgcgctaattcctggcggttattggcagacagctgcgccagctccagttcatcaacgagcgccttaagacgtgcagagtcagactgcaacgcgaaattttgtgcctgattgagcggagtattgccggtaagcgtccccaggcggcgctcgatctcatttaactgacggcgggcgtcggtttgctgttgcggcagttgattcagcgaatcggcaatctcgcgggcgcgctcctgctcttgctgggcctgacggcttttatccagcaactgactgctgacctggagaatttcctgattcagcgcgtcggtagacatccccggcgacacgctgcgcggctcgtcacgcatgttgtttaattgtgcgcgcagagtagcggagagtttcggataattatcaatgacttcttgatattgcttgatgcgctcaagggaaccttttcgttcctcaagcgcatttaaggcagactggagtgcctctacgacttctggctgcgcgggtttcgccgcttttgcctgctccagttcctgggtgatttgtttgctatcgggggccgtcgcggnnnncgccccccaactgaggcaccaggccatcagaaaagtgataatcaggcgcacgtcagcgtttcctttgatggattagacctggtcttttttatcgtcaaccaatgggctggcgtcgtgttctgcttcgatctcttcagcaggaagcggggcgggttcagcgtctggcgtaacaaaggtttcggtagatactgccagcggctggccaattttcgtgacagacaggctttccagttgctcaaccagattcactttacccggtgcaaacaggttgataacggtagagccaagtttaaagcgacccatttcctggcctttcagcagcgccacagaaccgtcgttttccccggcaggccaggtccagcgcttgatgatgccttcgcgcggcggcgtaatggtgcccgcccagaccgtctcaatgctgcctacaatcgtcgccccgaccagaatctgcgccattgggccaaattcggtatcgaacaggcagatcacgcgttcgttacgggcaaacagattcggcacgttctgagccgtgagatggttaacggagaagagatcgcccggcacgtagatcatctcacgcagaataccgttgcacggcatgtgtacgcggtggtagtcacgcggggagaggtaagtggtcacaaacgtaccgttgcggaacaggtccgccatcagatagttgcctgccagcagggcttcgaggctgtagttgtggcctttggcttgcaggattttatcttcttcgattttacccaactggctgataacgccatcggcaggcatgaccaggacattcggatcggtatcgattgggcgtacttcgtcacgcagcggacggacaaagaattcgttaaaggtgcggtagctggcggtgtccggcttttgcgcctctttcatgtcgaccttgtagtatttaacgaacagatcgataaccagttttgtcagccatcctgcccgcttgcttgcgccccaacccgccaggcgagtaagccatagtttcggcagaatgtactgtagcgaaagtttaaatgaatttaacaaggtagcctccaggccattgttttgtcgttcctgatccggcctaaatgccggatcctgaaaaaaaggggacgattctaacgacggttagcttaattgtcagtcatccgtatcagaaaagtttttacgcgtttttacctgcgccatgctttccagaatacggtgatagttttcgaaacgggtttccgcgatttttccttcctcaaccgcttcccggatagcgcagcccggatcggtatcgtgtttgcaatcgcgatatttacacagacctaaatagtcatggaattcgacaaagccctgagtgatttgttccggctccaggtgccagaggccgaactcacgcacaccaggggaatcaatcacatcaccgccgtgcgggaagtgatacaggcgtgcggcggtcgtggtgtgctgaccaagccccgagttgtcagagacatcgttggtcaggatctctttttgcagccccagcaacgcgttcagcaggctggatttgccgacgccagactgcccggcaaaaatgctgatgcgcccggtcaacgcctcttccagcggttttagcccatcctgagtatggctggaaaccatcaatacgcgataaccgatattgcggtagatatccatctgttcgttgacgaacgccatgccttcgtcgtccagcaggtctatcttgttgagcacaataatcggctcaatctgcaaggtttcgcaggccaccaggtaacggtcgataatattgagcgacagctccggcaaaatggcggagacaatgacaatctggtcgatgttggcggcaataggtttcacgccgtcgtagaaatccggacgcgtcaacactgaggtgcgctcatgcaccgcttccacgatccctttgacatttacgccttccgccgccggtttacccggacgccagactacgcggtcgccggtcaccagcgaacggatggtacggcgaatattgcagcggtgaacgtcgccatcggcggattccacatcagcgtgcataccaaagcggctgatgacgataccttcatcaggctcgccaaacagattgtcgtcgtagtcgggcttctccttagacgttttaagacgacgctggtgattggcgttcacgcggcgctgctggcctttggagagtttatttttactcaatcgtactgactcctggtcgcccctgatgggcaaaacatctatgatacacgcaattgtggatcaatatagtcactgtgaatgggtggaaaatagcatgagtgccaatgaaaacaacctgatttggatcgatcttgagatgaccggtctggatcccgagcgcgatcgcattattgagattgccacgctggtgaccgatgccaatctgaatattctggcagaagggccgaccattgcagtacatcagtccgatgaacagctggcgctgatggatggctggaacgtgcgcacccataccgccagcgggctggtggagcgcgtgaaagcgagcacgatgggcgatcgtgaagctgaactggcaacgctcgaatttttaaaacagtgggtgcctgcgggtaaatcgccgatttgcggtaacagcatcggtcaggatcgtcgcttcctgtttaaatacatgccggagctggaagcctacttccactaccgttatctcgatgtcagcaccctgaaagagctggcgcgccgctggaagccggaaattcttgatggttttaccaaacaggggacgcatcaggcgatggatgatatccgtgaatcggtggcggagctggcttactaccgcgagcattttatcaagctgtaaaatttttgctggtcacgtaagcgccggaatccacttgcggcggcgtgattttgacgctaaattgaacgtcttgctgataatttcagcacttgaganaaaaactcaaaaaaannnttttaggggggttgcagagggaaagatttctcgtataatgcgcctcccgtaacgacgcagaaatgcgaaaattacgaaagcaaaattaagtagtacgcgggaatagctcagttggtagagcacgaccttgccaaggtcggggtcgcgngttcgagtctcgtttcccgctccaaaatttgaaaagtgctgcaaagcacagaccacccaagcggg

SEQ ID NO: 1673 - DNA, 18 bp, Escherichia coli
  Strain O55:H7
  modified_base (14)..(15): a, c, g or t
accttgccaaggtnnggg

SEQ ID NO: 1674 - DNA, 14983 bp, Escherichia coli
  Strain O55:H7
  modified_base (57)..(58): a, c, g or t
  modified_base (81)..(82): a, c, g or t
  modified_base (2002)..(2002): a, c, g or t
  modified_base (2971)..(2972): a, c, g or t
  modified_base (4801)..(4801): a, c, g or t
  modified_base (5535)..(5535): a, c, g or t
  modified_base (6761)..(6764): a, c, g or t
  modified_base (12037)..(12037): a, c, g or t
  modified_base (12168)..(12168): a, c, g or t
  modified_base (13442)..(13442): a, c, g or t
  modified_base (13820)..(13820): a, c, g or t
tttcccgctccaaaatttgaaagtgctgtaaggcacagaccacccaagcgggaatanntcagttggtagagcacgaccttnncaaggtcggggtcgcgagttcgagtctcgtttcccgctccaaattcttctctcaataaaatatccacagcgacgcgatgcgttattgctggtttttgttgtctctgacaaactcttgtaaacagagttatccacagcctcaggccgtaatcttaatttcaaagaaacttcgcacggtgaatagtatttttttaacctattgatagataatttaaaaattaagatttcgttttgtcgagtcgatcacttgacgattttattcgtcttgaattgcaatgcgtttttatttttattcacaagctgtggatgaatcaggcgtcacgcggtaaccctttttcaattacccgaaccagacgctgttttttcggcaattgcacttcgactatgcacgcatttcgcctctcgatttgctgcgccatcgcccacgctatgtgctcatcaagaagtgggtgctcacctttgcgactctcgagcgccgccagaatcgtttcatcccagggcgcattgcctaatgccacggcgatattacgcagccagcgcaggtgacctatacggcgaatcgccgaaccttccgtgacttttaaaaacttctcttcgctccaggcgaataactcaatgagttccggtgcgtgtagcggcttacgcgggctgaaatcgtcttctgtagtgagttgtgaatagcgattccacgggcagataagctggcagtcatcgcaaccgtaaatacggtttcccattaacggtcgcaactcttccgggatcgccccttccagttcgatggtgagataagagatacagcggcgagcatcgacggtatatggctcgacgatggcaccggtcgggcaaatcgtcatacaggccacgcatttgccgcatccttcctcgactggttgatccacgggcagcggaatatcgaccagcaattcgcctaaaaagaagaacgaaccggccttgcgattgaggataagtgagtgcttacctgtccagccgagcccagctttttcagctaacgggcgctcgagaataggcgcagaatcgacaaacggtctaaaattcagcgaaacacaatgttgctgaatcatctcgcccagctttttgagtcggttgcgcagaagtttgtgatagtcacggcccagcgcataacggctaacatagccgagtttggggtttttcagcgtgctggcaaatgcggcgttagcaggaaggtaattcatccgcacgctgatcacgcgcagcgtaccgggcaataactcatgggggcgagcgcgcagcataccgtgacgtgccatccagtccatttcgccgtggtattgtttgtccagccatgcttgcagtttgggctcggactcgctgagatcggtatcggtaatacctacctgctgaaagcccagttccagcccccactgtttaattttttgcgctaactgattgagatcgaggggctctgacatgacggaccatacaatgaagaaaaaccccgtaagtataccacacaccgtctggcacgccgacgatatccgccgcggagaacgcgaggcggcagatgcgctggggctcacactctatgagctgatgcttcgcgctggcgaggccgcattccaggtgtgtcgttcggcgtatcctgacgcccgccactggctggtgttgtgcggtcatggtaataacggcggcgatggctacgtggtcgcgcgactggccaaagcggtcggcattgaggtcacgttgttggcccaggagagcgacaaaccgttgccggaagaggccgcgctggcacgcgaggcatggttaaacgcgggaggcgagatccatgcttcgaatattgtctggcccgagtcggtagctctgattgttgatgcgctgctcggtaccggcttgcagcaagcaccccgcgaatccattagccagttaatcgaccacgctnattcccatcctgcgccgattgtggcggttgatatcccttccggcctgctggctgaaaccggcgctacgccaggcgcagtgatcaacgccgatcacaccatcacttttattgcgctgaaaccaggcttgctcactggaaaagcgcgggatgttacaggacaactgcattttgactcactggggctggatagctggctggcaggtcaggagacgaaaattcagcggttttcggcagaacaactttctcactggctgaaaccgcgtcgcccgacttcgcataaaggcgatcacgggcggctggtgattatcggtggcgatcacggcacggcgggggctattcgtatgacgggggaagcggcgctacgtgctggtgctggtttagtccgagtactgacccgcagtgagaacattgcgccgctgctgactgcacgaccagaattgatggtgcatgaactgactatggactctcttaccgaaagcctggaatgggccgatgtggtggtgattggtcccggtctgggccagcaagagtgggggaaaaaagccctgcaaaaagttgagaattttcgcaaaccgatgttgtgggatgccgatgcattgaacctgctggcaatcaatcccgataagcgtcacaatcgcgtgatcacgccgcatcctggcgaggccgcacggttgttaggctgttccgtcgctgaaattgaaagtgaccgcttacattgcgccaaacgtctggtacaacgttatggcggcgtagcggtgctgaaaggtgccggaaccgtggtcgccgcccatcctgacgctttaggcattattgatgccggaaatgcaggcatggcaagcggcggcatgggcgatgtgctctctggtattattggcgcattgcttgggcaaaaactgtcgccgtatgatgcagcctgtgcaggctgtgtcgcgcacggtgcggcagctgacgtactggcggcgcgttttnnaacgcgcgggatgctggcaaccgatctcttttccacgctacagcgtattgttaacccggaagtgactgataaaaaccatgatgaatcgagtaattccgctccctgatgagcaggcaacattagacctgggcgagcgggtagcgaaagcctgcgatggcgcaaccgtaatctatctgtatggcgatttaggcgcaggtaaaaccacctttagccggggctttttacaggctttgggccatcagggtaatgtcaaaagccccacttatacgctggtcgaaccctatacgctcgacaatttaatggtttatcactttgatttgtaccgccttgccgatcccgaggagctggagtttatggggatccgcgattattttgccaacgatgccatctgcctggtggagtggccacaacaaggtacaggtgttcttcctgacccggatgtcgaaatacacattgattatcaggcacaaggccgtgaggcgcgcgtgagtgcggtttcctctgcgggtgaattgttgctggcacgtttagccggttaacctttgaaaggtggtgggatgatgtatcgcatcagaaattggttggtagcgacgttgctgctgctgtgcgcgcaggtgggtgccgcgacgctctctgatattcaggtttctaacggcaaccaacaggcgcggataacgttgagttttattggcgatcctgattatgcgtttagccatcaaagcaaacgcaccgtggcgctcgatatcaaacaaacgggcgtgattcagggactgccgttgttgttcagcggtaataatctggtgaaggcgattcgctccggaacgcctaaagatgcacaaacgctacggctggtggtcgatcttaccgaaaatggtaaaaccgaagcggtgaagcggcagaatggcagcaattacactgtcgtctttacgattaacgccgatgcgccgccaccgcctcctccgccgcctgtggttgtgaaacgcgttgaaacgcctacggttgtcgcaccgcgcgtcagcgaaccggcgcgcaatccgtttaaaacggaaagtaaccgcactacgggtgttatcagcagtaatacggtaacgcgtccggcagcgcgcgcgacggctaacactggcgataaaattatcatcgctattgatgccggacacggcggtcaggaccctggcgctatcggccccggtggtacgcgggagaaaaatgtcaccatcgccatcgcgcgtaaattgcgtactttgctcaatgacgatccgatgtttaaaggcgttttaacccgtgacggggattactttatctcggtgatggggcgcagcgatgtggcacgtaagcaaaacgccaatttcctcgtgtcgattcacgctgatgccgcaccgaaccgcagtgcgactggcgcttccgtatgggtgctctctaaccgtcgcgccaacagcgaaatggccagctggctggagcagcacgagaaacagtcggagctgctgggcggggcgggtgatgtgctggcgaacagtcagtctgacccctatttaagccaggcggtgctggatttacagttcggtcattcccagcgggtagggtatgatgtagcgaccagtatgatcagtcagttgcaacgcattggcgaaatacataaacgtcgaccagaacacgccagccttggcgttctgcgctcgccggatatcccatcagtactggtcgaaaccggttttatcagcaacaacagcgaagaacgtttgctggcgagcgacgattaccaacaacagctggcagaagccatttacaaaggcctgcgcaattatttccttgcgcatccgatgcaatctgcnccgcagggtgcaacggcacaaactgccagtacggtgacgacgccagatcgcacgctgccaaactaaggacgattgatgccaattcaggtcttaccgccacaactggcgaaccagattgccgcaggtgaggtggtcgagcgacctgcgtcggtagtcaaagaactggtggaaaacagcctcgatgcaggtgcgacgcgtatcgatattgatatcgaacgcggtggggcgaaacttatccgcattcgtgataacggctgtggtatcaaaaaagacgagctggcgctggcgctggcgcgtcatgccaccagtaaaatcgcctctctggacgatctcgaagccattatcagcctgggctttcgcggtgaggcgctggcgagtatcagttcggtttcccgcctgacgctcacttcacgcaccgcagaacagcaggaagcctggcaggcctatgccgaagggcgcgatatggacgtgacggttaaaccggcggcgcatccggtgggaacgacgctggaggtactggacctgttctacaacaccccggcgcggcgcaaattcctgcgcaccgagaaaaccgaatttaaccatatcgatgaaatcatccgccgcatcgcactggcgcgtttcgacgtcacgatcaacctgtcgcataacggcaaaatcgtacgccagtaccgcgcggtgccggaaggcgggcaaaaagaacggcgcttaggcgcgatttgtggcaccgcttntctcgaacaagcgctggcgattgaatggcaacacggcgatctcacgctgcgcggctgggtggccgatccaaatcacaccacgcccgcactggcggaaattcagtattgctacgtgaatggtcgcatgatgcgcgatcgcctgatcaatcacgcgatccgccaggcctgtgaagacaaactgggggccgatcagcaacctgcatttgtgttgtatctggagatcgacccgcatcaggtggacgtcaacgtgcaccccgccaaacacgaagtgcgttttcatcagtcgcgtctggtgcatgactttatctatcagggcgtgctgagcgtgctacaacagcaactggaaacgccgctaccgctggacgatgaaccccaacctgcaccgcgtcccattccggaaaaccgcgtggcggcggggcgcaatcactttgctgaaccggcagttcgtgagccagtagctccgcgctacactcctgcgccagcatcaggcagtcgtccggctgccccctggccgaatgcgcagccaggttaccagaaacagcaaggtgaagtgtatcgccagcttttgcaaacgcccgcgccgatgcaaaaaccaaaagcgccggaaccgcaggaacctgcacttgcggcgaacagtcagagttttggtcgggtactgactatcgtccattccgactgtgcgttgctggagcgcgacggcaacatttcacttttagccttgccagtggcagaacgttggctgcgtcaggtacaactgacgccgggtgaagcgcccgtttgcgcccagccgttgctgattccgttgcggctaaaagtttctggcgaagaaaaatcggcattagaaaaagcgcagtctgccctggcggaattgggtattgatttccagtcagatgcacagcatgtgaccatcagggccgtgcctttacccttacgccaacaaaatttacaaatcttgattcctgaactgataggctacctggcgaagcagtccgtattcgaacctggcaatattgcgcagtggattgcacgaaatctgatgagcgaacatgcgcagtggtcaatggcacaggccataaccctgctggcggacgtggaacggttatgtccgcaacttgtgaaaacgccgccgggtggtctgttacaatctgttgatttacatccggcgataaaagccctgaaagatgagtgatatcagtaaggcgagcctgcctaaggcgatttttttnnnngggccgacggcctccggtaaaacggcgttagccattgagctgcgtaaaattttaccagtagagttgataagcgttgattctgcccttatttacaaagggatggatatcgggacggcgaagccgaacgctgaagagttactcgccgcgccgcaccgattgctggatattcgcgatccgtcgcaggcttactcggctgctgattttcgccgcgatgcgctggcggaaatggccgatatcaccgcggcggggcggatcccactgttagtgggcggtacgatgttgtatttcaaggcattgctggaagggttgtcgccgctaccgtcggcagacccggaagtacgggccagaattgagcaacaggcggcagagcaaggttgggagtcattgcatcgtcaacttcaggagatcgatccggttgcggcagcaaggattcatccaaatgatccacaaaggctttcccgggcactggaagtttttttcatttcgggtaaaactttaacggaactgacgcaaacgtcaggagacgctctaccgtatcaggtgcatcagttcgccatcgccccggcgagccgtgaactgctccatcaacgaattgagcagcgttttcatcagatgttggcttcaggttttgaagcagaagtccgggcgctttttgcccgaggagatttgcatacggacttgccttccattcgttgcgtgggttatcgccagatgtggtcttaccttgaaggcgaaatctcatacgatgaaatggtttatcgaggtgtttgcgccacgagacagttggcgaagcggcagataacctggctgcgtggttgggaaggggttcactggcttgacagtgaaaaaccagaacaggcgcgtgacgaagtattacaggttgttggtgctatcgcaggctgaatgtgtacaattgagacgtatcgtgcgcaattttttcagaatcgaaaggttcaaagtacaaataagcatataaggaaaagagagaatggctaaggggcaatctttacaagatccgttcctgaacgcactgcgtcgggaacgtgttccagtttctatttatttggtgaatggtattaagctgcaagggcaaatcgagtcttttgatcagttcgtgatcctgttgaaaaacacggtcagccagatggtttacaagcacgcgatttctactgttgtcccgtctcgcccggtttctcatcacagtaacaacgccggtggcggtaccagcagtaactaccatcatggtagcagcgcgcagaatacttccgcgcaacaggacagcgaagaaaccgaataaggtttcgggctgttttttttacacggggagccagcgatcctgcgttccccgctgatctatttagagggttatacgcttgtttgaccgttatgatgctggtgagcaggcggtactggtacacatctattttacgcaagacaaagatatggaagacctccaggagtttgaatctctggtctcttccgccggtgtcgaagcattgcaggtgattaccggtagccgtaaagcgccgcacccaaagtattttgtaggtgaaggtaaagcagttgaaattgcggaagctgtcaaagcgacgggtgcttcggtcgttctttttgaccatgccctgagcccggcgcaagagcgtaacctggagcgtttgtgcgagtgtcgtgttatcgaccgcaccggccttattttagatattttcgcccaacgtgcgcgtacccatgagggtaagttgcaggttgagctggcgcagctgcgccatctggctacacgcctggtgcgtggctggacccaccttgaaagacagaaaggcgggattggtttgcgtggtccgggtgaaacccagctcgaaaccgaccgtcgtttgttgcgtaatcgcatcgtgcagatacagtcgcgcctggaaagagttgaaaagcagcgtgagcaggggcggcaatcgcgtatcaaagccgacgttcctactgtttcgctggtgggatataccaacgccggtaaatctacccttttcaatcgcatcaccgaagcgcgggtctacgcggcagaccagttgtttgccaccctcgacccgacgttgcggcgtattgacgttgcagatgtcggtgaaaccgtacttgcagataccgtagggtttattcgccacctgccgcacgatctggtggcagcatttaaagccacgttacaagagacgcggcaagccacattgctgctgcatgtgattgatgcggcggatgtgcgtgtacaagaaaacatcgaagcggtgaatacggttcttgaagagatcgacgctcacgagatcccaaccctgctggtgatgaacaagatcgatatgctggaagatttcgaaccgcgtattgatcgggacgaagagaacaaaccgatccgtgtctggctttccgcacagaccggagcggggataccacagctttttcaggctttgacggagcggctttccggcgaggtggcgcagcatacattgcgtctgccaccgcaggaagggcgtctgagaagtcgtttttatcagcttcaggcaatagaaaaagagtggatggaggaggacggcagcgtaagtctgcaagttcgtatgccgatcgttgactggcgtcgcctctgtaaacaagaaccggcgttgatcgattacctgatctaacggcgtagcgtctgaagcgtggagtcatatcctctggcgtcgaaagacaacagggatcaccgcataacaaatatggagcacaaacatggcgtggaatcagcccggtaataacggacaagaccgcgacccgtggggaagcagcaaacctggcggcaactctgagggaaatggaaacaaaggcggtcgcgatcaagggccacctgatttagatgatatcttccgcaaactgagcaaaaagctcggtggtctgggcggcggtaaaggcaccggatctggcggtggcagttcatcgcaaggcccgcgcccgcagcttggcggtcgtgtcgttaccatcgcagcggcagcgattgtcattatctgggcggccagtggtttctataccattaaagaagccgaacgcggcgtggtaacacgctttggtaaattcagccatctggttgagccaggtctgaactggaaaccgacgtttatcgacgaagtcaaaccggtgaacgtggaagccgtgcgtgaactggcagcttctggtgtgatgctgacgtcggacgagaacgtagtgcgcgttgagatgaacgtgcagtaccgcgtcaccaatccggaaaaatatctgtatagcgtgaccagcccggatgacagcctgcgtcaggctaccgacagcgccctgcgtggagttatcggtaaatacaccatggaccgcattctgacggaaggtcgtaccgtgattcgtagcgatactcagcgcgaactggaagagacgattcgtccgtatgacatgggtatcacgctgctggacgtcaacttccaggctgctcgtccgccggaagaagtaaaagcggcgtttgacgatgcgattgccgcgcgtgaaaacgaacagcaatacattcgtgaagcagaagcgtataccaacgaagttcagccgcgtgcgaacggtcaggcgcaacgtatcctcgaagaggcgcgtgcgtacaaggcccagaccatcctggaagctcagggtgaagtggcgcgttttgctaaacttctgccggaatataaagccgcgccggaaattactcgcgagcgtctgtatatcgagacgatggaaaaagtgttgggtaacacccgcaaagtgctggttaacgataaaggtggcaacctgatggttctgccgttagaccagatgctgaaaggtggtaacgcccctgcggcgaagagcgataacggtgccagcaatctgctgcgtctgccgccagcctcttcctccacaaccagtggagcaagcaacacgtcgtccaccagtcagggcgatattatggaccaacgccgcgccaatgcgcagcgtaacgactaccagcgtcagggggaataacgatgcgtaagtcagttatcgcgattatcatcatcgtgctggtagtgctttacatgtctgtctttgtcgtcaaagaaggtgagcgcggtattacgctgcgttttggtaaggtactgcgtgacgatgacaacaaacctctggtttatgagccgggtctgcatttcaagataccgttcattgaaacggtgaaaatgctcgacgcacgtattcagaccatggacaaccaggccgaccgctttgtgaccaaagagaagaaagacctgatcgtcgactcttacatcaaatggcgcatcagcgatttcagccgttactacctggcaacggggggtggcgacatttcgcaagcggaagtgctgttgaaacgtaagttctctgaccgtctgcgttctgaaattggtcgcctggacgtgaaagacatcgtcaccgattcccgtggtcgtctgaccctcgaagtacgtgacgcgctgaactccggttctgcgggtacagaagatgaagttactaccccggcggcagataacgccattgccgaagcggcagagcgcgtaacggctgagacgaagggcaaagttccggtcatcaacccgaacagtatggcggcgctgggtattgaagttgtcgatgtgcgaattaagcagatcaacctgccgaccgaagtgtctgaagcgatctacaaccgtatgcgcgccgagcgtgaagcggtagcgcgtcgtcaccgttcacaaggtcaggaagaagcggaaaaactgcgcgcgactgccgactatgaagtgaccagaacgctggcagaagctgagcgtcagggccgcatcatgcgcggtgaaggcgatgccgaagcagccaaactgtttgctgatgcattcagtaaagatccggacttctacgcattcatccgtagcctgcgtgcttatgagaacagcttctctggcaatcaggacgtgatggtcatgagcccggatagcgatttcttccgctacatgaagacgccgacttccgcaacgcgttaatataacgactgcggtacaggtcaataaagccaccgcatcctcagggatgtcggtggttttctttttctataaggataatgaatgaattcgacaatctggctggcgcttgccctggttttggtactggaaggtttagggccgatgctttacccgaaggcatggaagaagatgatctctgcgatgaccaatttgcccgataatattttacgtcgttttggcggtggacttgtggttgcgggcgttgtggtctactacatgttgaggaanacgattggctgaacaaaaaacagactgatcgaggtcatttttgagtgcaaaaagtgctgtaactctgaaaaagcgatggtagaatccatttttaagcaaacggtgattttgaaaaatgggtaacaacgtcntcgtactgggcacccaatggggtgacgaaggtaaaggtaagatcgtcgatcttctgactgaacgggctaaatatgttgtacgctaccagggcggtcacaacgcaggccatactctcgtaatcaacggtgaaaaaaccgttctccatcttattccatcaggtattctccgcgagaatgtaactagcatcatcggtaacggtgttgtgctgtctccggccgcgctgatgaaagagatgaaagaactggaagaccgtggcatccccgttcgtgagcgtctgctgctgtctgaagcatgtccgctgatccttgattatcatgttgcgctggataacgcgcgtgagaaagcgcgtggcgcgaaagcgatcggcaccaccggtcgtggtatcgggcctgcttatgaagataaagtggcacgtcgcggtctgcgtgttggcgaccttttcgacaaagaaaccttcgctgaaaaactgaaagaagtgatggaatatcacaacttccagttggttaactactacaaagctgaagcggttgattaccagaaagttctggatgatacgatggctgttgccgacatcctgacttctatggtggttgacgtttctgacctgctcgaccaggcgcgtcagcgtggcgatttcgtcatgttcgaaggtgcgcagggtacgctgctggatatcgaccacggtacttatccgtacgtaacttcttccaacaccactgctggtggcgtggcgaccggttccggcctgggcccgcgttatgttgattacgttctgggtatcctcaaagcttactccactcgtgtgggtgcaggtccgttcccgactgaactgtttgatgaaactggcgagttcctctgcaagcagggtaacgaattcggcgcaactacgggtcgtcgtcgtcgtaccggctggctggacaccgttgccgttcgtcgtgcggtacagctgaactccctgtctggcttctgcctgactaaactggacgttctggatggcctgaaagaggtgaaactctgtgtggcttaccgtatgccggatggtcgtgaagtgactaccactccgctggcagctgacgactggaaaggtgtagagccgatttacgaaaccatgccgggctggtctgaatccaccttcggcgtgaaagatcgtagcggcctgccgcaggcggcgctgaactacatcaagcgcattgaagagctgaccggtgtaccgatcgatatcatctctaccggtccggatcgtactgaaaccatgattctgcgcgacccgttngacgcgtaattctggtacgcctggcagatattttgcctgccgggctaacagtgtgatacattgctgtgtcggttaagccattacgctatccgacacagtgttaaatcctcgcttttttccttccccgaactgaaataaattagcgacacagcttgtggctggtttatcatcaatataaatgtatttttttcccgatttcccttttgaggttgatgtgcagttaacgagtttcactgattacggattacgtgcgctgatctacatggcgtcattgccagaagggcggatgaccagtatttctgaagtgactgacgtctacggcgtctcccgtaatcatatggtcaaaataatcaatcaacttagtcgtgccggctacgngactgctgttcgtggaaaaaatggcggcattcgcctgggtaaaccggcgagtgcgatacgtattggtgatgtggtgcgcgagctggagcccttatcgctggtgaattgcagcagtgagttttgccacattacacctgcctgtcggttgaaacaggcgctttctaaggccgtgcaaagttttcttacggaactggataactacacgcttgccgatttggttgaagagaatcaaccgctttataaattattgctggtggagtgacgaaaatcttcatcagagatgacaacggaggaaccgagatgtcacaagatcctttccaggaacgcgaagctgaaaaatacgcgaatcccatccctagtcgggaatttatcctcgaacatttaaccaaacgtgaaaaaccggccagccgtgatgagctggcggtagaactgcacattgaaggcgaagagcagcttgaaggcctgcgtcgccgcctgcgcgcgatggagcgcgatggtcaactggtctttactcgtcgtcagtgctatgcgctgccggaacgcctcgacctggtgaaaggtaccgttattggccaccgtgatggctacggctttctgcgggttgaagggcgtaaagatgatttgtatctctccagcgagcagatgaaaacctgcattcatggcgatcaggtgctggctcagccgctgggtgctgaccgtaaaggtcgtcgtgaagcgcgtattgtccgcgtactggtgccaaaaaccagccagattgttggtcgctactttaccgaagcgggcgtcggctttgtggttcctgacgatagccgtctgagcttcgatatcttaatcccgcccgatcagatcatgggcgcgcggatgggctttgtggtggttgttgaactgacccaacgcccgactcgccgtaccaaagcggtgggtaaaatcgtcgaagtgctgggcgacaatatgggcacgggcatggcggttgatatcgctctgcgtacccatgaaattccgtacatctggccgcaggctgttgagcaacaggttgctgggctgaaagaagaagtgccggaagaagcaaaagcgggccgtgtcgatttgcgcgatttaccgctggtcaccattgatggcgaagacgcccgtgactttgacgatgcagtttactgcgagaaaaa

SEQ ID NO: 1675 - DNA, 5007 bp, Escherichia coli
  Strain O55:H7
  modified_base (533)..(533): a, c, g or t
  modified_base (1023)..(1023): a, c, g or t
  modified_base (1326)..(1326): a, c, g or t
  modified_base (1837)..(1837): a, c, g or t
  modified_base (1937)..(1937): a, c, g or t
  modified_base (2518)..(2519): a, c, g or t
  modified_base (2817)..(2818): a, c, g or t
  modified_base (3785)..(3785): a, c, g or t
  modified_base (5006)..(5006): a, c, g or t
gcggcggctggcgtttatgggtcgcgattgctgacgtcagctactatgtgcgtccgccaacgccgctggacagagaagcgcgtaaccgtggtacgtcggtgtacttcccttcgcaggttatcccgatgctgccggaagtgctctctaacggtctgtgctcgctcaatccgcaggtagaccgcctgtgtatggtgtgcgagatgacggtttcgtcgaaaggccgcctgactggctacaaattctacgaagcggtgatgagctctcacgcgcgtctgacctacaccaaagtctggcatattctgcagggcgatcaggatctgcgcgagcagtacgccccgctggttaagcatctcgaagagttgcataacctctataaagtgctggataaagcccgtgaagaacgcggcgggatctcatttgagagcgaagaagcgaagttcattttcaacgctgaacgccgtattgaacgtatcgaacagactcagcgtaacgacgcacacaagttaattgaagagtgcatgattctggcgaanatctcggcggcgcgtttcgttgagaaagcgaaagaaccggcactgttccgtattcacgacaagccgagcaccgaagcgattacctctttccgttcagtgctggcagagctggggctggaactgccgggcggtaacaagccggaaccgcgcgactacgcggagctgctggagtcggttgccgaccgtcctgatgcagaaatgctgcaaaccatgctgctgcgctcgatgaaacaggcgatttacgatccggaaaaccgtggtcactttggcctggcattgcagtcctatgcgcactttacttcgccgattcgtcgttatcctgacctgatgctgcaccgcgccattaagtatctgctggcgaaagagcaggggcatcagggcaacaccactgaaaccggtggctaccattattcgatggaagagatgctgcaattgggtcagcactgttcgatggcggaacgtcgtgccgacgaagcaacgcgcgatgtgnctgactggctgaagtgtgacttcatgctcgaccaggtaggtaacgtctttaaaggcgtaatttccagcgtcactggctttggcttcttcgtccgtctggacgacttgttcattgatgggctggtccatgtctcttcgctggacaatgactactatcgctttgaccaggtagggcaacgcctgatgggtgaatccagcggccagacttatcgcctgggcgatcgcgtggaagttcgcgtcgaagcggttaatatggacgagcgcaaaatcgactttagcctgatctccagcgaacgcgcaccgngcaacgtcggtaaaacggcgcgcgagaaagcgaaaaaaggcgatgcaggtaaaaaaggcggcaagcgtcgtcaggtcggtaaaaaggtaaactttgagccagacagcgccttccgcggtgagaaaaaaacgaagccgaaagcagcgaagaaagacgcgagaaaagcgaaaaagccatcggcgaaaacgcagaaaatagctgcagcgaccaaagcgaagcgtgcggcgaagaaaaaagtggcagagtgatcattaccctcttcaaacagaagagggttagattgctgacaaaatgcgctttgttcatgccggatgcggcgtgaacgccttatccggcctacataatcacgcaaattcaatatattgcagggatcatgtagaccggataaacgtagtgcatcaggcaaaacgtaaacaacgagtacattaatgagcgaaatgatttacggcatccatgcagtgcaggccctgctggagcgcgcccctgaacgttttcaggaagtctttatttnaaaaggccgtgaagataaacgtctgttaccgctgatccacgcccttgagtcccagggcgtggttatccagttggcaaaccgccaatatctcgacgagaanagcgacggtgccgtgcatcagggcattatcgcccgcgtgaagccaggacgtcagtaccaggaaaacgatctgccggatctgatcgcttcgctcgatcaaccgttcctgctgatcctcgacggtgtaaccgatccgcacaacctcggcgcgtgcctgcgtagcgcggacgctgctggcgttcacgcggtgattgtgccgaaagatcgctccgcacagctcaacgccacggcgaaaaaagtagcctgcggcgcggcagaaagcgttccactgattcgggtgactaaccttgcgcgcaccatgcgtatgtgcaggaagagaatatctggatcgtcggtacggcaggtgaggcggatcatacgctctatcaaagcaaaatgaccggacgcctggcgctggtgatgggcgcggaaggtgaaggtatgcgtcgcctgacccgtgaacattgcgatgagttgatcagcatcccaatggcaggaagtgtttcttccctgaacgtttcggttgcaaccggaatttgcttatttgaagcggttcgtcagcgcagctagttcctctgaattatgaaaagccatccagatttnnatggtttttttttgtctatagctggtaagataattacgtattgcaaatattcattttattaatatttaaacttaatctatatggaataatatatgacatggaatccgttggcgctggcgacggcgctgcaaactgtacctgaacaaaatattgatgtaacaaatagcgagaacgcattaattattaaaatgaatgattatggcgatttgcaaatcaatattctttttacttcccgccaaatgattatcgaaacctttatttgtccggtgagtagtatcagcaatccagatgaatttanncccttcttattaagaaatcagaagatgatgccgttgtcatcggtaggaatctccagcgtacaacaagaagagtattacattgttttcggggcgttatcgcttaaatcttctcttgaagatatcctgcttgagataacctcgctggtagataacgcattggatctggctgaaattacagaagaatattcacactaattacaaggacgggtatttatgggaattttaaaaagtttatttacgctggggaaatcgtttatctcccaggcggaagaatccattgaagaaccccagggtgtgcgcatgctggaacagcatattcgtgacgctaaagctgaactcgataaagccggaaaatctcgcgttgatctgctggcgcgggtgaaattaagtcacgataagctgaaagatttacgtgagcgcaaagccagtctggaagcccgtacgctggaagcgttaagcaagaacgttaatccgtcgttgattaacgaagttgctgaagaaatcgcgcgccttgagaatctcattaccgctgaagagcaagtgttgtcgaatctggaagtctcccgtgatggcgtggaaaaagcagttgcagcgacagcgcagcgtatcgctcagtttgagcagcaaatggaagtcgttaaagccactgaagccatgcagcgtgcacaacaggctgtaacgacttctaccgttggcgcatcttccagcgtttcgacagcagcagaatccttaaaacgcctgcaaacgcgtcaggccgaacgtcaggctcgcctggatgctgccgcacagttagaaaaagtcgcagacggtcgcgaccttgacgaaaagctggcggaagccggaattggcggtagcaataaaagtagcgcccaggatgtattagcaagactgcaacgccaacagggcgagtaatttttttgccagcctcactgcaaggctggcaactattttaaggataaaatatgtntggttttttccagcgtctgtttggcaaggataataagcctgctatcgatcgcggtccgctgggacttcatctcaatagtggctttacgctcgacacgttagcgtttcgtttgctggaagatgaattgctgattgcgctgccgggtgaggaatttacggtagtcgctgtcagccacatcgatctgggcggcggtagtcagattttccgctactacacttcaggcgatgagtttctgcaaatcaataccaccggcggcgaagatattgatgacattgatgatatcaagctctttgtctatgaagagagctacggtatcagtaaagagagtcactggcgcgaggcgatcaacgccaaaacgatgggggcaatgaccttaaactggcaggaaaaacgctggcagcgattttttaacagcgaagaaccgggaaatatcgaacccgtctacatgctggaaaaagtagaaaatcaaaatcatgctaaatgggaagtccataattttaccatgggctaccagcggcaagtgaccgaagatacttacgaatatttgctgctaaatggtgaggaatcttttaacgatctcggcgagccagagtggttattttcgcgcgcgttgggtgtcgatatcccgctgacatcacttcatattattggttaattacaaggacgtttacaatgcatatactggattcacttcttgcctttagtgcctatttttttattggcgtggctatggtgattatttttctgtttatctactccaaaattacaccgcacaatgaatggcaattaatcaaaaacaataataccgcagcgtcactggcgttcagcggtacattgttgggttacgtgatccccttatccagtgcggcaatcaatgcggtgagtattccagactatttcgcctggggcgggattgcactggtgattcagttactcgtttttgctggtgtcagactttatatgcccgcattaagcgaaaaaattattaatcacaataccgcagcaggaatgtttatgggaaccgccgcgctggctggcggtatttttaacgcagcttgtatgacatggtaatggacgatcatggccagaaaacgcaaatcaagaaataacagtaaaattggtcacggagcgatcagtcgcattggtagaccgaataatccttttgaaccgcgtcgcaatcgctacgcacaaaaatacttaacgttggcgctaatgggcggng

SEQ ID NO: 1676 - DNA, 2085 bp, Escherichia coli
  Strain O55:H7
  modified_base (391)..(391): a, c, g or t
  modified_base (1134)..(1134): a, c, g or t
ttttgtattgaaaggttgtggcgatagtggcgatgtcgataacgacggcgacggaacgttttattcgacagtgcaggattgtattgatgacggtaataatgccgacatttgcgcgcgtggctggaacaacgccaaagcggcattttatgccgatgttccgaagaatatgactcagcagaactgtcagtctaagtacgaaaattgctactacgacaatgttgaacagagttggatcccggtcgtttctggatttttgttaagccgggttattcgtaaagatcgcgatgagccgtttgtctataacagcggcggatcctcatttgcttcccgccccgtctggcgcaacacttccggtgattactcctggcgctccggttctggcaaaaaagantcttactcttcaggcggctttaccaccaaaaaagcgtcaaccgtttctcgcggcggctatggtcgttcttccagcgcccgtgggcattggggaggctaatcatgctgagacacaacgttcctgtgcgacgggatctggaccagatcgccgctgacaacggtttcgactttcatatcatcgacaatgaaatctattgggatgagagtcgggcttaccgttttactctgcgccagattgaagagcagatcgaaaaaccgactgcggaactgcatcagatgtgccttgaggtggtggatcgcgcggtaaaagatgaagagatcctgacgcaactggcgatcccgccgttgtactgggatgtgatcgctgaaagctggcgcgcccgcgatccttcgctgtatggacggatggattttgcctggtgtggcaatgcgccggtgaagctgctggagtacaacgccgatacgccaacttcattgtacgagtcggcttatttccagtggctgtggctggaggatgcccggcgcagcggcattattccgcgtgatgccgatcagtacaatgctattcaggaacgcctgatttcacgctttagcgagctttacagtcgggaaccgttttatttttgctgctgtcaggacaccgatgaagacaggagtaccgtgctgtacttgcaggactgcgcccagcaggcagggcaggagtcgcggtttatctacattgaagatctcggtttgggcgtcggnggcgtactgaccgatcttgatgataatgtcatccagcgtgcatttaagctgtatccgctggagtggatgatgcgtgacgataacggtccgctgctgcgcaagcgtcgcgagcaatgggtggagccgttatggaaaagtatcttgagtaataaagggctaatgccgctgctttggcgcttcttccctggtcatcctaaccttcttgcatcctggtttgagggtgaaaaaccgcagattgccgctggcgaaagctatgtgcgtaaaccgatctactcgcgcgaaggcggaaatgtcaccattttcgacggccagaataacgtcgttgaccacgctgatggtgattacgccgatgaaccgatgatctaccaggcgtttcaacctctgccgcggtttggcgatagctacacactcatcggtagctggattgtcgatgatgaagcgtgcggaatggggatccgtgaagataacacactgatcaccaaagacacctcacgtttcgttccgcattacattgctggataagaatgttttagcaatctctttctgtcatgaatccatggcagtgaccatactaatggtgactgccattgatggagggagacacagtgcactggcaaactcacaccgtttttaatcaacctataccattaaataacagcaacttatacctgtctgatggcgcgctttgcgaagcggtaacgcgtgaaggtgctggctgggatagcgattttctagccagtattggtcagcagttaggaacggctgaatcccttgaactggggcggctggcgaatgtgaatccgcctgaactgttgcgctacgatgcgcaaggacgccgtctggacgatgtgcgttttcaccccgcctggcacctgctgatgcaggcactatgtaccaatcgggtgcacaatcttgcctgggaagaagacgctcgctccggcgcatttgtgg

SEQ ID NO: 1677 - DNA, 739 bp, Escherichia coli
  Strain O55:H7
gcggcgcgttttatgttgcacgcacaggttgaggcggggtcgttatgtccgataaccatgacctttgccgccacgccattgttgttacagatgttacccgcgccgtttcaggactggaccacaccgctgttgagcgatcgctacgattctcacttattgccaggtgggcaaaaacgcggtttgttgattggcatgggaatgacggaaaagcagggcggttccgatgtcatgagcaacaccacccgcgcagagcgtctggaggatggctcttatcggctggtggggcataaatggtttttctcagttccgcaaagcgatgcgcatctggtgctggcgcagaccgcgggcggtttgtcctgcttttttgtgccgcgctttttgcctgacgggcaacgcaacgcgattcgcctcgagcggctgaaagataagctgggtaatcgctctaacgccagttgtgaagtggagtttcaggatgccattggctggttattggggcaggaaggggaaggaattcgtctgatcctgaaaatgggggggatgacgcgttttgattgcgccctgggtagccatgccatgatgcgccgtgcgttctcgctggcgatttatcatgcgcatcaacgccatgtttttggtaatccattgatccaacagccccttatgcgtcatgtcttaagtcgcatggcacttcagcttgaagggcaaacggcgttgctgtttcgtcttgcgcgagcgtgggacc

SEQ ID NO: 1678 - DNA, 12085 bp, Escherichia coli
  Strain O55:H7
  modified_base (2278)..(2278): a, c, g or t
  modified_base (4346)..(4346): a, c, g or t
  modified_base (5263)..(5263): a, c, g or t
  modified_base (5956)..(5957): a, c, g or t
  modified_base (9084)..(9084): a, c, g or t
cgatgccaaagaagctctgtgggcgcgtttatttacgcctgcggcaaaatttgtgatctgcaaacgaggtatgccgtttgtggccgaagcgatggaggtgctgggcggcattggttattgcgaggagagcgagctgccgcggctttaccgggagatgccggtaaacagtatttgggaaggttccggcaatattatgtgcctggatgtgctgcgcgttctcaataagcaagcgggcgtatacgacttattgtcggaagcatttgtagaagtgaaagggcaggatcgctattttgattgcgcggttcgtcgtttacagcagcagctgcgtaagccagctgaagaactggggcgagagattactcatcagctattcctgctgggctgcggtgcgcaaatgttgaaatatgcttctccgccaatggcgcaggcgtggtgtcaggtgatgttagatacgcgcggcggcgtacggttgtcagagcagatccagaatgatttattgctgcgggcgacggggggagtgtgtgtgtaagcgtatacgactgatgcgacgctggtttcgattaactaaatgaaatatgtgaaaattgtaggccggacaaggcgctcgcgccgcatccggcattgttcatttgctgtagatgacactcatgcatacagtatcgcctgtacgcgccagttatcaggctgctggtcttcgtacatggtaataatgcggtaccatgacgcaccttgttcatcggcctttaacgccacgatacgttccacgtcctgcggatcccctgaaatattgctaactgagatctgacctatttcattcaggcccgtcacgcagtcagcactggcgaattctgcagactgtgccgtggcgctcgcaggataagtcactaattgcagcgagggtgaggcaagtaattgtttcatcgtcagctccatttttcgtttccccacatgttgcagggcattccatcgcggtaataaacgcccaggcttccagccggtaatttattgtgcacaggtaaacgcatagggacgcaaagcaatgtaaagctgactatgtaagttgtctgatttatttacggtacaaaatggcttgtgaataccactgtcctgtcacgatggtttcgtccaccatgacgacaacgtaataatcagcttttgcagcgacagcttttgctctgatttctgctaatgcgtcatccggagaaccccgaaccattgtgcttacgctacctattcgctgtaacccttgcgtctggtcgcggcgaatctcttgcggatggtccgttactggcggtgctggctgtggcgtaccttgcagtgcgctacaggcacttaacatcaacaccaataataaactggcaaaccggtaaataacgctattacgtttcctgctaaccatagtgtagtgccttattaatttaactttgggggaatgttcccgaattgttacctggtacgcgattttcgaatgaaaacgtgacgaaagcgtaacccacatctcaacattatgaactaataccgccagcagaaacttgtgctaaggatttcttcatgtcataccagacaaaaaggagagacagatgattgaaatagaatcacgcgagctggcagatattcccgttcttcatgcttatcctgtcggacaaaaagataccccgttaccgtgcgtgattttttatcacggctttacttcgtccagtctggtgtatagctattttgccgttgcgctggcgcaggctggtttgcgggtgatcatgccggatgcgcccgatcacggtagccgttttagtggtgacgcagcgcggcggttaaatcaattctggcaaatcttgctacaaagtatgcaggaattcactactttacgtgcggcaatagccgaagaaaagtggctgcttgatgaccgtctggcagtcggtggtgcgtcgatgggcgcgatgacggcactggggattaccgctcgccaccccacggtgagatgtaccgccagcatgatgggatcgggctattttacatcactcgcccgttcactgtttccaccgctgatacctgaaacggcagcacagcagaatgaattcaataacattgtcgcgccactggcagagtgggaagcgacaaaccacctggaacaacttagtgacagacctctactgctgtggcatggcctcgacgatgacgttgtgcctgccgacgaatcactacgtttgcagcaggccttaagcgagacgggacgggataaactgctaacctgttcatggcagccaggcgtgcgtcaccgcantacgcctgaggcgttagatgctgccgtgacatttttccgccagcatctttaaacacgcagaatgctgaccccttgcgcttccagttgttgcaggatttccgggttagcatttttgccggtgataagcatatcgatttgatcggcacggctaaaaagcattcccgcgcgttctccaatcttactgctatcaaccagtaccaccagtttccctaccacgctcagcatcttctgctctgccattgctgtcagcatatcggttttatacaacccttctgcggtcagcccttttccgctggtaaacatccagtgcccggcatagagactgttttcgctgccctgcgggcttaaagtgatggactgacttttgttgtactgtccgcccataatgatcacgctgtcatgttcttgatcgatcaggtaatttgccagcggtagataattagtgatgatttgcactggcttgccacacatttcccgcccaagcagaaacgcggtggagccgcagttgatgactacgctttcgcccggattaaccagctgcgaggccgctttagcgatacgtactttttcatcgtgattctgcgcctgatgcagattcatcggcgtccagcgcgggcgctgttgggtaatagcttctgcaccattgcgcacttttttcagtttgccgctttcgtcaagtttattgatatcgcgtcgcgcagtggcaggcgaaattcccagacgctcaacgactttctcaacggtcacaaagcccaattgtgcgagcatttccaggaggatttgatgtctttgtgcttcagtcatgagctattccgataaaatttgatttttttagatgatatttgaaatagccaggaaatactacgccggatagcgcgaacttctccacgctatccggtataaacgacagattacaggaatgacttgaacggcagatccggttcaatagtgaagcaatcatcgaaaccgcgcggatagtggtactcgaagttgtctttatccagcggccaggtaaatttgccgcccacctgccagataaacggcttgaagccatacttcagacgatcttttttcatctcccacagcacgcggatctcttgcggatcggcctggaagtttgaccagatatcgtggtggaacgggataaccactttcgcattcagcgcttcacccatacgcagcatatcggcgctggtcatcttgtcggtgataccgcgcgggttttcgccgtacgatcctaacgccacgtcgatctgatgttcgttaccgtgcttcgcataatagttagagtagtgggagtcgccgctgtgatacagggagccgccaggcgttttgaacaggtagttcaccgcgcgatcgtccatgccatctggcagtacgccagccgctttttgatcggcaggcagggtgatcagtgcagtacggtcgaaagcatcaagcgcatgaatttcaatgtctttcacttttactacatcgcccggtttgaccacgatgcaacgctctttcggtacgccccagccaatccacaaatccacacaggttttcggtccgataaacggtacgtcatcagcacagttctgcatcacggcagcagcgacgttaacgtcgatatgatcgttgtgatcgtgagtcgccagtaccgcgtcgatctggcgaatcgcaaacggatcaagaacaaacggggtggtacgcaggtttggctgcagttttttcacgccagccatgcgctgcatctggtgaccctgtttcattaacgggttaccgtgactttgtttgccagtgccgcaccagaaatcaacgcaaacgttggtgccaccttccgatttcaaccagatcccggtgcagccaagccaccacatcgcaaatgtgccaggagcgacctgttcttgttcaatttcttcattcaaccagctaccccactccgggaaagtgctcaggatccaggattcacgggtgatacttttcactttactcatcgccatttaccttcatgatagttcaattcgaatcaatgtgtgattggttttgattaatcctgacactattttttctggaaggcaatgaccantttttgactttttgccagggaagttgttgttgattttgagtatggaaagatttaatggaatgtataattcaattaactaaatgaatttaaatgaataattgtttcgttgcgtgaatcccgctctatccatgtggaattatttgcgggtcgcgtcacatttaatcataaataatcttgttgtgattacttttgaaaattagagtgagtgcacaacattccgggtgtgtggaatacccggttacctcttcttcaggagatcgttatggagatcctctacaacatctttaccgtattttttaaccaggtcatgaccaatgccccgttgttgctgggtattgtgacctgtctgggctacatcctactgcgcaaaagtgtcagcgttattattaaaggcacgattaaaaccataattggtttcatgttgttgcaggcagggtccggcatcctcaccagcaccttcaaaccggtggtggcgaaaatgtccgaagtctacggcattaacggcgcaatttccgatacctacgcttcaatgatggcaaccatcgaccgcatgggcgatgcctatagctgggtgggttacgccgtattgttagcgctggcactgaacatctgttacgtgctgttgcgtcgcattaccggcattcgcacaatcatgttgaccggccacatcatgttccagcaggccgggttgattgccgttacgctgtttatcttcggctactccatgtggaccaccattatctgtaccgcgattctggtttcgctctactggggcatcacttccaacatgatgtacaagccgactcaggaagtgacggatggctgtggtttctccatcggtcaccagcagcagtttgcatcatggattgcctataaagtcgcgccgttcctcggcaaaaaagaggagagcgttgaanacctcaaactgccgggctggctgaacattttccacgacaacatcgtctccacggcgattgtgatgaccatcttctttggcgccattctgctctccttcggtatcgacaccgtgcaggcgatggcgggcaaagtgcactggacggtctacatcctgcaaaccggtttctccttcgcggtggcgatcttcatcatcactcagggcgtgcgcatgtttgtggcggaactctctgaagcatttaacggtatctcccagcgcctgatcccaggtgcggttctggcgattgactgtgcggctatctatagcttcgcgccgaacgccgtggtctggggctttatgtggggcaccatcggtcagctgattgcagttggcatcctggtcgcctgcggctcttccattctgattattccaggctttatcccgatgttcttctccaacgccaccatcggcgtgttcgctaaccacttcggcggctggcgtgcagcgctgaagatttgtctggtgatgggaatgatcgaaatctttggttgcgtctgggcggtgaaactcaccggtatgagtgcctggatgggcatggcggactggtcgattctggcaccgccgatgatgcaaggcttcttctccatcggtatcgcctttatggccgtcatcattgtaattgcactggcttatatgttcttcgctggccgcgcgnngcgcgcagaagaagatgcagaaaaacaactggcagaacagtctgcttaataaggagttttgattatgaccgtacgtattctggctgtgtgtggcaacggacaaggcagttccatgatcatgaagatgaaagtggaccagtttttaacccaatcaaacattgaccatacggtaaacagctgcgcggttggcgagtacaaaagcgagttgagtggcgcggatatcatcatcgcttctacgcacattgcgggcgaaatcaccgtgaccggcaacaaatacgtggttggcgtgcgcaacatgctctctcctgccgactttggcccgaaactgctggaagtgatcaaagagcatttcccgcaggacgtgaagtaaggacgcgccatgaaattacgtgattcgctggctgaaaataaatccatccgtctgcaggctgaagcagagacatggcaggaagcggtgaaaatcggcgttgacctgctggtggcggcagatgtggtagagccgcgttactaccaggcgattctggatggcgttgaacagttcggtccttatttcgttatcgctccgggcctggcaatgccgcacgggcgtccggaagagggcgttaagaaaaccggtttctctctggtaacgctgaaaaagccgctggagttcaaccacgatgacaacgatccggtggatatcctcatcaccatggcggcggtcgatgccaatactcaccaggaagtgggcatcatgcagatcgtcaacctgtttgaagatgaagagaattttgaccgtttacgcgcctgccgtaccgagcaggaagtactggatctcattgaccgcaccaacgcggcagcttaagaaggaattgaacatgtcattaccgatgttgcaagtcgcgctggacaaccagactatggatagcgcctacgaaaccactcgcctgattgccgaagaagtcgacattatcgaagtgggcaccattctgtgcgtgggcgaaggcgtgcgtgcggttcgtgacctgaaagcgctctacccgcacaaaatcgtactggcagacgccaaaattgccgatgcaggcaaaatcctttcgcgtatgtgcttcgaagccaacgctgactgggtgacggtaatttgctgtgcggatatcaacaccgccaaaggcgcgctggacgtggcaaaagagtttaacggcgacgtgcagatcgaactgaccggttactggacctgggaacaggcgcaacagtggcgcgacgcaggtattcagcaggtggtttatcaccgcagccgtgacgcgcaggccgcaggcgtggcgtggggcgaagcggacatcaccgcgatcaaacgtctttccgatatgggcttcaaagtcaccgtcactggtggcctggcgctggaagatctgccgctgttcaaaggcattccgattcacgtctttatcgcgggccgtagtatccgtgatgccgcttctccggtggaagccgcacgtcagttcaaacgttccatcgccgaactgtggggctaaggagcggatatgttgtccaaacaaatcccgcttggcatctatgaaaaagcgctccccgccggggagtgctggctggaacgcctgcaactggcaaaaacgttgggcttcgattttgtcgagatgtcggtagatgaaacggacgagcgcctgtcgcgcctcgactggagccgcgagcagcgtctggcgctggtgaatgcgattgttgaaaccggcgtgcgcgtgccgtccatgtgcctttctgctcatcgtcgtttcccgctgggcagtgaagatgacgcggtgcgggcgcaggggctggagattatgcgtaaagctatccagttcgcccaggacgttggtattcgcgtgatccaactggcgggctatgacgtttactatcaggaagccaataacgaaacgcgtcgtcgtttccgtgacggcctgaaagagagcgttgagatggcgagccgcgcgcaggtgacgctggcgatggagatcatggattatccgttgatgaactccatcagcaaggcgctgggctacgcgcactatctcaacaatccgtggttccagctctacccggatatcggcaacctgtcggcgtgggacaacgatgtgcagatggagttgcaggccggaatcgggcatatcgtcgcggtacatgtgaaagacaccaaaccgggcgtcttcaaaaacgtgccatttggcgaaggtgtggtggatttcgaacgttgcttcgaaacgctcaaacagagtggctattgcgggccgtacctgattgagatgtggagcgaaacggcggaagacccggcggcagaagtggcgaaagcgcgtgattgggtgaaagcgcgcatggcgaaagcgggcatggtggaggcggcataatgcaaaagctaaaacagcaggtgtttgaagccaacatggatctgccgcgctatgggctggtgacctttacctggggcaacgtcagcgctatcgaccgcgaacgcgggctggtggtgatcaagcccagcggcgtcgcctacgaaaccatgaaagcagacgatatggtggtggtcgatatgagcggtaaggtggtggaaggggaatatcgtccgtcttccgacaccgcgacgcatctcgaactctaccgtcgttatccgtcgcttggcggcattgtccatacccactccactcatgctaccgcatgggcgcaggcggggctggcgatcccggcgttaggcaccacgcacgctgactacttctttggtgatatcccgtgtacgcgtggattaagcgaagaagaggtgcagggtgagtatgaactgaacactggcaaagtgattatcgaaacgctgggcaacgccgagccgctgcatacgccgggaattgtggtgtatcagcacggaccgttcgcctgggggaaagatgcccacgacgcggtgcataacgcggtagtgatggaagaagtggcgaaaatggcgtggattgcgcgcagtattaatccacaactcaatcacatcgacagcttcctgatgaataaacacttcatgcgtaagcacggccccaacgcttattacgggcagaagtagaacacgcgctgcggaaatttccttcctcgggagataactggtctaattccgcagccgtttttcaaaaanagccccctgcgaagggggcaaagcaaactatggcaatgtttcgttggttatacctggtgctagcgataaatatccgcgctggcgtgcatattgccgttactccccggttcccgcatcagaattacgtggtagtacgttgcgccttgcgcatctgtttcttcatttaatgcctgacgtgcttcgctttcagtggcgaaattatgattgatataaatcacgcctaagctttgcacatcgtccatatttctggcctggtggttattaatttcaatggctgcccatgtatttgcacttagcaaaagcacagccagaagggctaaaactcgactgaacatagatacctcctcgacggctgactttgtgtgctctcctctgtgatgatcttctgatttaattttaatcaatgataaagaagttgatggtgaccatttctgatgcagttgttcgaaaaaacaccatgatgaagtgtgatgaacttcaaatcagcgtgttagtccactttggtgaaagatgagatttatttgtcggctggccttgagtttagcggggtatgtcagtactataacgcgtcatttttcagccgacctttaacacgttccttgcctccccgggattcggctgacccagacaggaggctgaataatccgtaaggagcaattcgatgcgtcattacgaaatcgtttttatggtccatcctgaccagagcgaacaggttccgggcatgatcgagcgctacactgctgccatcactggtgcagaaggcaagatccaccgtctggaagactggggccgccgtcagctggcttacccgatcaacaaactgcacaaagctcactacgttctgatgaacgttgaagctccgcaggaagtgatcgatgagctggaaactaccttccgcttcaacgatgccgttatccgcagcatggttatgcgtaccaggcacgctgttaccgaagcatctccgatggttaaagcgaaagacgagcgccgtgagcgtcgcgatgatttcgcaaacgaaaccgctgatgatgctgaagctggggattctgaagagtaatttctgatgaccaaccgtctggtgttgtccggcaccgtgtgcaggactccccttcgaaaggtcagtccatcaggaattcctcactgccagttcgtgcttgagcatcgttctgtgcaggaggaagccggctttcaccggcaggcatggtgtcaaatgcccgttattgttagcggacacgaaaaccaggccattactcacagtataacggtcggcagtcgcataaccgttcaggggttcatttcatgccacaaggcaaagaacggactgagcaaaatggttttgcatgccgagcagattgaattgatagattctggagactagccatatggcacgttatttccgtcgtcgcaagttctgccgtttcaccgcggaaggcgttcaagagatcgactataaagatatcgctacgctgaaaaactacatcaccgaaagcggtaagattgtcccaagccgtatcaccggtacccgtgcaaaataccagcgtcagctggctcgcgctatcaaacgcgctcgctacctgtccctgctgccgtacactgatcgccatcagtaatcggtcacggtccattaatacgactttgagaggataaggtaatgcaagttattctgcttgataaagtagcaaacctgggtagcctgggtgatcaggtaaacgttaaagcgggctatgctcgtaacttcctggtaccacagggtaaagctgttccagctaccaagaaaaacattgaattcttcgaagcacgtcgcgctgaactggaagctaaactggctgaagttctggcagctgctaatgctcgcgctgagaaaatcaatgcactggaaactgttaccatcgcgtctaaagctggcgacgaaggtaaactgttcggttccatcggtactcgcgacatcgctgacgctgtaactgcagctggcgttgaagtggctaagagcgaagttcgtctgccgaacggcgttctgcgtaccactggcgaacacgaagtgagcttccaggttcacagcgaagtattcgcgaaagtgatcgtaaacgtagtagctgaataattcgttattcaacgagacgtaaaaacgccgaccactggtcggcgttttgctttctatttttcgtcaggtattagtttcgcaagtagatccattcaccattctcttgtgtccataagtcaggatggtttgctggcgttagatacatacgagcgcaactgatgtctcgctcctgcggcactcgctcgaaacccaaacccgagtagattgcggctgaacttgataaggaacgcagaccaattttcaaatcatggggtaaatcagaatacgcgtttagcaatgcagcaatgatgaatccgagggcattagaaacgcctgtaacagtgcgaagttggtcgatataaagatcgattgttggtagttcagatgaccagcaattaggcatttgggcaggaagggttacaacgtatcctatcgtttggccggtatagtctggagtaccataaccaggtcccaaaaccacttcgtgtattgtgtatttactgttgggttcgaaggattcgacatcttgcaataaatatttcagttctgcggttaacctcgcacccgcgtaagctttattgtatttctgggcgtgaatattatctaatgtagcttcatggttccatccaaaagaattatcaccattcattgttactccatcgtaagcattacacttcgttgctaacttattgaatgcttgccagtctgagagatctagtttgtggatctcaacagtacgtctgccatcgcaattatgatctcttccacgatttgaaagtaatgtagcgcgtgcgtattgatgaaattttaattttactggtttgtcggtggacgaaaaacgagataaatatgcaggaaatgaataaatagtggttggtaatgtcattgtaatgtgacctgtttaatgtttttataaatatc

SEQ ID NO: 1679 - DNA, 39083 bp, Escherichia coli
  Strain O55:H7
  modified_base (3790)..(3790): a, c, g or t
  modified_base (7640)..(7640): a, c, g or t
  modified_base (8530)..(8530): a, c, g or t
  modified_base (12898)..(12898): a, c, g or t
  modified_base (13311)..(13311): a, c, g or t
  modified_base (14087)..(14088): a, c, g or t
  modified_base (14095)..(14096): a, c, g or t
  modified_base (14286)..(14286): a, c, g or t
  modified_base (14289)..(14289): a, c, g or t
  modified_base (16763)..(16763): a, c, g or t
  modified_base (19021)..(19021): a, c, g or t
  modified_base (19023)..(19023): a, c, g or t
  modified_base (19242)..(19242): a, c, g or t
  modified_base (20143)..(20145): a, c, g or t
  modified_base (27594)..(27594): a, c, g or t
  modified_base (33742)..(33742): a, c, g or t
  modified_base (37390)..(37390): a, c, g or t
  modified_base (37405)..(37405): a, c, g or t
  modified_base (37426)..(37426): a, c, g or t
  modified_base (37858)..(37858): a, c, g or t
aatgttcacagaaaaaaatcgatattaataaaaataagtttgttttctgaagtggtgaaaatagcggatggtgaaagatattaatatcaaaaatcgctcattatggatataacgatgcacccggggagaaaatgacttccacgccttacaccgtacattcttgttgtgcggtatgtaattattctacgctgtcggtatcggtgtattcgttaatcagcaggttaaccagccacaaaaagccattgagaaaattattgattttacatgggattattatattgctaacccctggtttttaaaaattgtgcatagtgaaaatcaaagtaaaggtgtgcattatgcaaaatcacagcgtctcttagaaatcaaccatgcgcacttgcagttaatggaatccttattggatgaagggaagaaatacaatatttttaagccagatatcgacccattgcaggtgaatattaatattgctgcgcttgggggatattatttgatcaaccagcatacgcttggcctggtttatccggtgcgccgtaaaaccccgtccttcagggcggggatatacggcgcggttttccacctaaccaggtgtttgctgttgttcaatgtattgacggatggcggatattggcgcacctccgcagctactggcaaaatagccaggactccacaaaacgcctttgtagtaatacctgactgcaatatctggtcgatctcgtcgcagtaacctacccgatacgcctttgaggctgtttaccagactggatatcgccagtttgggaggatagttaattaacaaatggacgtgatctggttcgccatccatttcaaccagttcagcttcaaaatcagcacatacctttgaaaagtaagtgcgtagtttttctgtcgcgtcatggtcaaaaatctggcgtcggtatctggtgacaaagaccaggtgaacatgcatcaggaaaacacaatgccttccacgccggatatcggtttcttttttcacagaccaaagtatcatttggcctgtgaaacgactacaggcatttaaattccagttaagacccggtggtcaacaggagcgtgaaatgaggcgcttcgcaggcgcatgtcgtttcgttttcaatcgtgctctggcgcttcagaatgagaatcatgaggccggtaataaatacatcccttacgggaaaatggcttcctggctggttgagtggaaaaatgccactgaaacgcaatggcttaaagatgccccgtcacagccattgcaacagtcactgaaagaccttgagcgggcttacaaaaacttcttccggaagcgggctgcttttccccgattcaaaaagcggggacagaatgatgcattccgctacccgcagggcgttaagctcgatcaggaaaacagccgtatttttctgccgaaacttggctggatgcgctaccggaatagccgtcaggtcacgggtgttgtgaaaaatgtcactgtcagccagtcctgcggtaagtggtacatcagtattcagactgaaaatgaagtatcaactccggttcacccttcagcattaatggtcggactggatgctggcgtggctaaactcgccacgctgtcagatggcacagtctttggacctgtaaacagttttcagaaaaaccagaagacgctggcgagacttcagcgacagttaagccgcaaggtcaaattcagcaacaactggcagaagcagaaacgcaaaatacagcgactgcattcctgtatcgcaaatatccgcagggactaccttcacaaagtcacaacgaccgtcagcaaaaaccacgcaatgatagtcattgaggatttgaaggtcagcaacatgtcaaagtcagcagcgggtacggtcagccagccggggcgcaatgtccgggcaaaatcaggtttaaaccgttcgatactggatcagggctggtatgaaatgcgccgccagcttgagtacaagcagctctggcgtggcggtcaggtgcttgctgttccgccagcgtacacaagccagcgttgcgcgtgctgtggtcatacagcgaaagaaaatcgcctgtcacaaagtaaattcagatgccaggcatgtggatatacagcgaacgctgatgtaaatggcgctcgtaacattttagcggcggggcacgccgttcttgcctgtggagagatggtgcagtcaggccgcccgttgaagcaggaacccaccgaaatgattcaggcgacagcctgaacgtagcagggatccacgtccttcagggcttggaggatgtcaacacatcagtatggtttcaccccaggcactggaagccagacgtaaggtcatcaaagagacaatccttagctggcttttggttgacccttcatctaccgcgcacgaataaaactgccatccggctggcgggtgaacaggacctgttgattattccccgtatcaatggttaagcccgtcaccacgccgctggcgttctggcggattttcaccatctgcccgttttgcaaattactcagcggcttacccgcgccttctacctgcgccattgcatagacatcggtagcgggcagtccgtggtcgcggaacagctgcgccatcgttttaccgggttcgacacggtaagagcgccattgattatcaattccgctatctggctggaatggttgcgtttgggtagtttgcggctgttcttctggctggccttcctgtataggttctggagcgaccggagccacctgatcaggataattttgtggggtgactaattgcgcccgcagctgttcttctgtcggcggttgtgattgcgactgaatatctaactgcgcttcacgcgtcaccaccggcgcgttgggcgtatcatcagatggaagcagaaatccgaccaccaatacaatggcggcaataatgatcccccgacgatgcatcggcggcagcgggtccatgaagcgaaaattgtccggcgcgtgccagactttctccagggttggttttagttcaaagcgcccgggcatggtttcctcctgctccgcgtcttgttcctcaatcatagcctatgaataagctaacgctatgatgtccgtggtaaacccgcctttattatattcatacgggatattgctattgtttctttttccctgggatttgtcatcattcccgcgacaaagttttacccaaagaagtgtggctgatatgctgcccgctactttataccctaagaaaggaaatacgatgaccaccccaacttttgacaccatcgaagcgcaagcaagctacggcattggtttgcaggtagggcaacaactgagtgaatctggcctggaagggctgctgccagaagcactggttgcaggtattgccgatgcgctggaaggcaaacatccggctgttccggttgatgtggtgcatcgcgcgctgcgtgaaatccacgagcgcgccgatgccgttcgtcgtcagcgtttccaggcgatggctgctgaaggtgtgaaatacctggaagaaaacgccaaaaaagaaggtgtgaatagcaccgaatctggcctgcaattccgcgtgatcaaccagggtgaaggcgcaattccggcacgtaccgaccgcgttcgtgttcattacaccggtaaactgatcgacggcaccgtgtttgacagctccgttgctcgtggtgaacccgctgaatttccggttaatggcgtgatccctggctggattgaagcactgactctgatgccggtaggttctaaatgggaactgactatcccgcaggaactggcatatggcgagcgcggcgcaggcgcatccatccntccgttcagcaccctggtgtttgaagtcgaactgctggaaatcctctaagcagcgcattctgttcccctcgaaccagaggggagcaggcattcagcaataaacccttcagtttgccaaacggcgctattttgtgttgcaaagaccccgtaagcgtgtatttttgtgagctgtttcgcgttatcaccgtgatatgacactcactttaaacataaaattaacattagatctaaatcttagtattcatcccgcgtattgttacctaatatcgatgagtcccgatacagattcgtcgtatcatagactgactaaaggccgtagagcctgaacaacacagacaggtacaggaagaaaaaaacatggtagatcaggtaaaagtcgttgccgatgatcaggctccggctgaacagtcgctacggcgcaatctcacaaaccgacatattcagcttattgccattggtggtgccattggtacggggttgtttatggggtctggcaaaacgattagccttgccgggccgtcgatcattttcgtttatatgatcattggttttatgctctttttcgtgatgcgggcaatgggggaattgctgctttcgaatctggaatacaaatcttttagtgacttcgcttccgatttactcgggccgtgggcaggatatttcaccggctggacttactggttctgctgggttgtaaccggtatggcagacgtggtggcgatcacggcttatgctcagttctggttccccgatctctccgactgggtcgcctcgctggcggtgatagtgctgctgctgacgcttaacctcgccactgtgaaaatgttcggtgagatggagttctggtttgcgatgatcaaaatcgtcgccattgtgtcgctgattgtcgtcggcctggtcatggtggcgatgcactttcagtcaccgactggtgtggaagcgtcattcgcgcatttgtggaatgacggcggctggttcccgaaaggtttaagtggcttctttgccggattccagatagcggttttcgctttcgtggggattgagctggtaggtacaacagctgcggaaaccaaagatccagagaaatcactgccacgcgcgattaactccattccgatccgtatcattatgttctacgtcttcgcgctgattgtgattatgtccgtgacgccgtggagttcggtagtcccggagaaaagcccgtttgttgaactgtttgtgttggtaggtttgcctgcggctgccagcgtgatcaactttgtggtgctgacctctgcggcgtcttccgctaacagtggcgtcttctctaccagccgtatgctgtttggtctggcgcaggaaggtgtggcaccgaaagcgttcgctaaactttctaagcgcgcagtacccgcgaaagggttgactttctcgtgtatctgtctgctcggcggcgtggtgatgttgtatgtgaatcctagcgtgattggcgcgttcacgatgattacaaccgtttccgcgattctgtttatgttcgtctggacgattatcctttgctcgtaccttgtgtatcgcaaacagcgtcctcatctacatgagaagtcgatctacaagatgccgctcggcaagctgatgtgctgggtatgtatggcgttctttgtgttcgtggtcgtgttgctgacactggaagatgacactcgccaggcgctgctggttaccccgctgtggtttatcgcgctggggctgggctggttgtttattggtaagaagcgggctgctgaactgcggaaataaccgcattatcatgctggatggcgcaatgccatccagcttttagatcactcacccgccagcgcccttgggaacagtacattgttttccaggctgatgtgatccatcaggtcatcaatcagttcattaatgccgttatacatcgctttccaggtggtgcaggcttccggcggcggtgtgacgttattggtattgtgtttgatcacttccagcagttcacccgcttcatcgtgctcgctttccattacgctgattggccccattgcctggctgcccatgccttgtttgatcatcgggaagaggatctgctcttctttcatcatgtggctggaaagctcttcatgcagcatggtcaggtattttgtcagcccttttggcacgctcggtttgtcggcgtgaacgcgctcgactttagtcgcttgcagaatcagctccggcagttgctcgcggtgacgagcgtggtagcgcacgatgatatggtcgatgatttctgccagcggggcgctacgccagtctttctcaatcggttgttcagcaagctttgccagctcagcttcaatgacctcaacatccagttctttacgtgccgccgcacgcgccagcgtttgcttaccgccgcagcagtaatccatatcatatttacgaaacagagccgaagcgcgaggaatagagagcgccagttcacctaaaggttggtcgcgataagccatagctgatacctcattcttaataagataagatgtattttaaatgcatctttaaggcaaaagctataacccttacgtagcagaggcttatttaactcactgccagcgtgtcaactttctgagacagattcagttaaaggtttttctggttttgctctaaccgcgatgaccacgccaatcactaacagcgcgataccgctcagcgtcattagcggcggcatttgctggcggagtaaaaaggtgtacagcaaacctgccagcgtttcgaaaacaatcagcggcccgagaatcactgtcggtaatcgctggctggcgacgttccagcagagtgcgccaacccatgagcaaagcacggctatcgcaatcatcagactaataaacaccagcggacgggggccaaagggtagggagaagtccggcgtttgcgtattcagccagtaacaagcgacgagatagccgataagtgaaaccggcagtgtgaccagcgcctgcgctgttgcccacatcatcggatgtttgtcgggattttcccgcagccagcgggcgttgcgcagggcataccacgcccagcagaccacggaaactaacgccagcacgatgccagaggtataacgtgcccagtcaaaattggggagtccgtggtttaactcagcaatattcacacacgccaggccgatgccaatacaaatcagtgccggggcgagttttccccacgcgagtttgccgtcgcgctggctataaagcagattggcgaagacgggaatcaccaccggcagggtgccgataatcatcgtggaaacaggcgcaccagtacgttgaatggcactggcaaggcagaagtaatagatgaggttgcccatcatagtgagcatcaaggcggtaagccagtcgcgacgcgccaactgacgcagacgcacgcgtcccagccaggcaatgggcagcgcaattaaccctaacgccagataacgccccatcgactgcaacatcgccgggtattccggcacgatcaacggcccgacaaaaataagcccccacatcaaccctgctaacagggcgtacagcacgccgctaatcattactggcatccattgatctgtcagaagaaagttcaggaagcagacatgattgctcccggcatcccgtcattatcagagaggatgcgggaggatgccactttaattaactagttattaacattaaaaagatggcttacgctttcggctaacgttgtcgttgggtggccaatcaatttgctaagtgttttgctgtcatcaaacagaccgcctttcgatgcgccaacgtcagaatccgccagcatatccgccagtccgtcgggcagtccgacgcttttcagtgccgcggcgaaatcggcttcnctcagattttgataggtaacctgtttgccgctctgtttggtcagctctgccgctaactgtgtcaacgtccaggcactatcgcccgccagttcgtaaaccttgccttcgtgaccggcttcgctaatcacgcgtgccgcagctgccgcataatctgcccgcgttgctgaggcgattttgccatcgcccgccgcaccgataaatacgccgtgttccagtgctgccggggcgctggcgaggtagttttcggtgtaccagccgttgcgcagtagggtgtaaacgatgccagaatcagccagcattttctccgtctcgatgtgctcatcggcgaggccgagcggagatttatccgcgtgaagcaggctggtataagcgataaatttcacgccagccgtctttgcggcattaataacattacgatgctgcggggcacgttgacccacttcgctggaagagatcagcagtagtttttccactccctgaagtgcagatgtcagtgcggcttcatcgccgtagtcagcctgacgcacggtaatgccttgtgctgtcagtgcctgggcttttgccggattacgaacgatagccactatttggctggcaggaaccgttttcatcaaggattcaataacatactgaccaagttggccagtggcaccagtaatagcgatcatgggaagtctccatcgttttgtcttgtgtttaaatacgctaacacctaaacttacttttagtaagtacgcacaaaaaggtaagtatgaaatgagtcaggttagcctgtcgcaacaactgaaagagggtaatctctttgcggaacagtgcccgtcgcgcgaggtgttgaaacacgtcaccagccgttggggggtgttgattctggtggcgctacgcgaaggtantcatcgctttagcgacctgcggcgcaaaatcggcggggtgagcgaaaagatgcttgcgcagtcgttacaggcgttagaacaggatggttttcttaaccgtatcgcgtatccggtggtgccgccgcatgttgaatacagcctcacgccgctgggcgagcaggtgagcgaaaaggttgctgcactggcggactggattgagttgaatttgcccgaggtgttggcggtgcgggatgaacgtgcggcataactgccggatgcgcggcctacggtgtatgacttgtagggcggataagatgcgccagcatcgcatccgccaataaatgccggatgcgattgatgatttataggccgaaaaagaagtgttttacttactcaaatccacctgataaatcgcaaacccgatatcatcggtcgcgactttattcatcggatactgccctttctctttaataaacgctgcggctttatctgacggggaagtttcgaaacggatatccagtttcttatcggcagctatcggtgctaaacgccagttgttatctgccgccgggtgaatttcccccgcacgtttcgactcatcagcaatccacgctgccagcaccgagcggttctcatccggtgaagcaaaagcgatatggctgtcgcccgtcccggcaaatttgccgccgtaagcgcgatagttattggtggcaacgaggaacatagcgttcggatcaatcggcttgccattaaaggtcaggttcttaatcctttccgcattggcattaatcatctggcactcgccgtcataacgggcgggctgggtaacatcaatctgataattcacaccatcaataacatcaaagttataagtgcggaaaccatcccagttgatgagtgactgtggtttcgtgctgttgggatcaatctggttaaactgtccggcggagcactccagccactctttcacctctttaccgctggctttcaccacaatcagcgtattgggatagagataaagatcggcggcattacggaaggtcaactggcctttttccacctccacatagcttgccgggtcatttttgcgaccaccgactttaaacggtgcggcagctgaaagcaccggcagttttgccagatccggatcgccctgaatgtaatgctcgacatacgctttttgcgcgttgttcactacttgcacggtcggatcgtcctgcaccagcgccagatagctatacatattgtcggcagatttaccgattggcttgctgacgaactggcgtgtggcatcgtgatcggctttgagtgtttctaccagcttgctgtcttccgccgcgagggattttttattggcgatgtcgtaaatcggccgtgcttccgctttcgcctgcgtcacctgccatttaccgctgtcattactgagttgtaagtcgaccaccccaagatgatcgccccacatgcccggcattaccgccggaacaccattcagcgtgcctttggtgatatcagccccttcgatatcagcaaaatctttacccgggaaaacggcgtgagcatggccaaacataatggcgttaacgcccggaatttcactgaggtaataaactgagttttccgccattactttatacggatcggcagacagcccggaatgcgccagaacgacaacgacatcggcacctttctcgcgcatttcaggctcgtatttgcgcacggtttcggtaatatcattcaccgtcacttttccggataaattagctttatcccagcccatgatttgcggcggcacgacgccaatatagccaatcttcagcgtctgtttttttccgtctttatcgaccacttcggtgtctttaattaaatacggtgtaaacattggctgtttggttctggcgtcaatgacgttggcatttacataagggaatttcgctcctgccagcgcatttttcaggtaatccagaccgtagttaaactcgtggttgccaagcgttccgacggtatagtccagcgtatttaatgccttatagaccgggtgaatatcacctgcttttaatcctttcgccgacatgtaatcggccagcggactcccctgaatcaaatcgccgttatcgaccagtacgctgtttttcacttcattgcgggcattgttaatcaggcttgccgtacgtaccagtccgaatttttccgtggcggtgtctttgtaataatcgaaatccatcatgttgctatgcagatcagtggtttccatgatacgcagatcgaccgtcgctgcattcacactggcggcaatcagcgtggccaggagcgttgcgctaaacttaatcatcagggacatccttttatcatcgggaatacgaaagaaaagggagaataaacgtcttacttatagaacagtgaagaatgccacaattttacgctttgaaaatgatgacactatcacagttggtgcattcattaatgatagggtataagtaaaacaataagttaacaccgctcacagagacgaggtggagaaatgttagatcaagtatgccagcttgcacggaatgcaggcgatgccattatgcaggtctacgacggggcgaaaccgatggacatcgtcagcaaagcggacaattctccggtaacggcagcggatattgccgctcacaccgttatcatggacggtttacgtacgctgacaccggatattccggtcctttctgaagaagatcctcccggttgggaagtccgtcagcactggcagcgttactggctggtagacccgctggatggtacgaaagagtttattaaacgtaatggcgaattcaccgttaacattgcgctcattgaccatggcaaaccgattttaggtgtggtgtatgcgccggtaatgaacgtaatgtacagcgcggcagaaggcaaggcctggaaagaagagtgcggcgtgcgcaagcagattcaggtccgcgatgcgcgcccgccgctggtggtgatcagccgctctcatgcggatgcggagctgaaagagtatctgcaacagcttggcgaacatcagaccacgtccatcggctcttcgctgaagttctgcctggtggcggaaggacaggcgcagctgtacccgcgtttcggaccaacgaatatttgggacaccgccgctggacatgctgtggctgcagctgccggagcgcatgttcacgactggcagggtaaaccgctggattacactccgcgcgagtcgttcctgaatccggggttcagagtgtctatttactaaattcagatggcagaaacagtgtatttcctgattctgccatcctgatttctcccaacctaaaaagttataaataaaaagagattgtatttaaagtgcaaaaattcaattgctaataagttacattttaataatgagcgttttttgatagtttacttctatagtgagatatttaatggcgacataaagtaaccaaataaaataaggttgtcatatgttacccaggatcagacacaataattttattggtgcggtggagttatttgtaaagtcttcgtatacaaaaacacattcaaacaatttttttaacaacatccatcatgcatttaagaaaaaagattggatttcgaattatgatagcctgttaactttgagggagttctttcgttgcgcaactcagattgataaaagtagttatcaggtgctttcatcaaaaaatgaaactgttaacgctatggataagtttcttatcagtttcagccttaaagataacggtgccgaatatacaatgacattgcgaggcagtggatttgaatacgaagaaatccccataacaataaatgagtataactcattcatggatttcaagaaccgtgaatttccgttagaacaaaacagacgattgtatgcctgggatattctgcagaaaaaacagtctgacataccgaaaaggattaaaggttatattcaccaggcgattggtgacgtgtctttaggttatgctttattggatgatatagtaagcaaattaaaacggggtaaatttgaactacaagggccaggaggtggaattaaacagtgcgatggatggtatatttacgaaaaaataattgatgataattttgccatagtcatagaatctttgggctttgcgcttaaaatctatggaggggatgaacgttttcgtaatggttcctctgttgtcttggaggatgaagattactctcttatttataattttctggttaatgcgggttgccaacaagtcgaattagccgaacaagtggatgcgatagtaagtgcgaatctggccgcagatagtgatattaccaaagaaaagatttgcgagaaatataaatcgaccattgaggcgtttaaaaaagagcaactagcgttaccagtattagttcggngtaagaactcagagacttaattcccctatcccatagataacgataggggaaaattatttttgcagaatttatgttattgccattatttgagcaacttttgcagcaggtccatcacttgctgcacctcttcctgagtgagcgccccgtctttggcccattgcacgcgaccgtctttatccagcaccactacagcggaactttcttcatccagctgccaggcaccgcgcgcgacgccattgctatcgacaataaactgcgaccagggataaagctttttattactctccagactgctgcgcacaaacatgccggaacccggaatcgcgtcgtcggtgttaacaatggtggtggtctggtaacgatcgtgcggtaacttcgctgatttaatcgcttcaatcagcgtcgcgtttttntcttttgcagaggtgcgaccagcaatatgttgcagtactcgcacttttcccactaactgcgcgctgttccaggttttgtagctaaactgatctttatcaagcaccaactcgccccgatcggtaatgccaatcggcggcactcgctgaccggtttcgaactgatgtgcggaagccatcatcggcaacagcaggcaggtgagtgccagaatcttgcgtagggtcatggtgtttccttcttatgatatgcaggtgatccgaccacttgggtctgagttttaatcatatgtgctatttatcgaatttcccgcaagtgtgatgccagtttgcggtcaagcgcacaaatcatatgaaaaatgaatgcttatactgaagaccgcgcttcggtaaaaagataattctgaataattgtaacctttaggtaaaaaaagttatacgcggtggaaacattgcccggatagtctatagtcactaagcattaaaatttgcgcctcataatagttgggccgattgtggcaccgcacaggcgtaatactcagcaggagataacaatgaaaattttccaacggtacaacccacttcaggtggcgaagtacgtaaagatcctgttccgtggacgattatacatcaaggacgttggcgcttttgaattcgataagggtaagattcttatcccaaaagtgaaggataagctgcatttgtcagtgatgtccgaagttaaccgtcaggttatgcgtctgcaaacagagatggcttaaccaaagtgctatgcagtaaanngtgctanncagtaaaaagtgctatgcagtaataagacggctcctgattcaggagccgttgatgtttatgggggttacgcgacgctttcttctttatctttagcgtcaggcagttttggcgaaagggctgtggccttgctgtcgatccgggtcaccagcagctggtcgatgcggtagttatcgatatccaccacttcanatntgtagccggcgaatttcaccgaatcggtgcgtttcgggatcttacgcagcataaacatcataaagccgccgatggtttcgtagttgcccgactgcgggaactcgtcaatatccagcacgcgcatgacgtcgtcaatcggagtgccgccgtcaatcagccatgagttctcatcacgggcgacaatctgctcttccagtccctgaccgaccagatcgcccatcagcgtggtcatcacgtcgttgagggtgatgatccccactaccagcgcgtactcgttcatgatcaccgcgaagtcttctcctgcggttttaaaactttccaacgcctctgaaagggttaacgtatccggcacaatcagcgtgttgcgaatttgtacgccgctgttcagtgccaggctttggttagccagcacgcggttcagcaggtctttagaatcgacatagccgatgatgtggtcaatatcttcattacagacgaggaacttagagtgcggatgttccgccaccttatttttcagactttgctcatcttcgtggagatcaaaccaaatcacgttttcacgcggtgtcattgaagacggaacggtacgggattccagctcaaagacgttttcaatcagctcgtgttcctgtttacgtaacacgcccgccagcgcaccggcttccactaccgcgtagatgtcatcagaagtgatgtcatctttacgtaccattggcagtttgaaaatacggaagattatgttcgccaggccgttgaagaaccacaccagcggggtgcaaacgtacaggcagaagcgcatcgggttgatgatacgcaaagccacagcttctggcgcaatcataccgatgcgtttcggggttaaatccgcaaacaggataaacatgccagtcactaacgagaaagagagaataaagctcagttgctcagagagctctgccgacatatagcgggagaacaggctgtgaaaagctggagaaaatgccgcatcaccgacgataccgccgagaatcgccactgcgttcagaccgatttggaccacggtaaagaacatgccgggattttcctgcatattcagaacgcgttgggcatttatattgccttcatcagccagcagtttaagtttgattttgcgtgaggcggcaagtgagatctcagacatcgagaagaacgcacttacagcgatcaagcagagtatgactaaaatactgtttaacatatcttatccgacctttcaggccagatcctcggaaggggaagttgattaatttgtgtgaaatacacattgaaagccgattcgaagaaagtgaaccggcattttcagtggctagtatagcgtaaggtactgtaaagccgccagagggttaaaattcagacagctgaaaaatgcaaaactgcctgatgcgctatgccgatcaggcctacgcagtccttgcaatatattgaatttggacgattttgtaggcctggcaaggcgtttacgccgcatccggcataaacaaaacgcactttatcaacaatctacatttgtacccgtaacgctatgcttccggtggcagacagacgccaattccgccaattccacagtaaccgtacgggtttttatgcagatattgctggtggtcatcttcggcataataaaacggtgtggcgttagcgatttccgtggtgatgtgacgatcgtcatcggcggcaagcatcgccgcctgaaaacgttccagactggcgcgagctgcggcatcctgttctgggatcagcggataaatcgctgaacgatactgcgtgccgtggtcattgccctgacgcattccctgggcgggatcgtgattctcccaaaatacctgtagcaactgctcatagctgatgacggaaggatcgtaaacaatgcgtaccgcttcggcatgaccagtatcaccggagcacacttcccgataagtcggatttggcgtatagccgccggtataacctgcggcggtgctgtaaacgccgtgtaactgccagaacagacgctccacaccccagaaacaacccatcgcaaaaatggcaatctccattccgtcaggtacattggtcattgagtgaccgttaaccgcatgcagcgtggctacgggcatcggggtgttacgtccaggcagggcatcggcgggggaaaccagatgctttttatcaaataaactcatggtgtcgctctcccgaaaatcggtcattggggttaaggttgtaacaagaggcgtatttgcacacaataaccaccgtgaataggtctaaagtaaaacataagaaatatttggggtttagtctgctttttaatccatattactggatttttgttaagccgtttaacggcgttccaggggcaggaaaaaaggatattcaggagaaaatgtgcgctatatccgacagttatgctgtgtaagcttactctgcttaagcggatctgccgtcgccgcgaacgtccgtctacaggtcgaggggtnatcgggacagctggaaaagaacgttcgtgcgcagctttctacgattgaaagtgatgaagtgacgccagaccgtcgctttcgcgcacgcgtcgatgatgctatccgcgaaggtctgaaagcgctgggttattaccagccgaccattgaatttgatctccgtccaccgccaaagaaagggcggcaggtattgatcgccaaagtcacgccaggcgtgccggtgttaattggcggcaccgatgtggtattgcgcgggggcgcgcggaccgataaagactatttgaaattgctcgatactcgcccggctattggcacggtactgaaccagggcgattatgaaaatttcaaaaagtccttaaccagcattgcgttgcgtaaaggttatttcgatagcgaatttaccaaagcgcagctgggcattgcgctcggcctgcataaagccttctgggatattgattataacagtggcgaacgttaccgctttgggcatgtgacctttgaaggatcacaaatccgcgatgaatacctgcaaaatctggtgccgtttaaagagggcgatgagtacgaatcgaaagatctggcagaactgaaccgccgactttctgctaccggctggtttaactcggtggtggtggctccacaatttgataaagcgcgcgaaacgaaagtattaccattgacgggcgtggtttcgccgcgaacagaaaacactatcgaaaccggggtcggttactctacggacgtgggaccgcgcgtgaaagcgacgtggaaaaaaccgtggatgaactcatacggtcacagtctgaccaccagtaccagtatttccgcgccggaacagaccctcgacttcagctataaaatgccgctgctgaagaatccactggaacaatattatttggtgcagggcggttttaagcgcactgacctgaacgataccgagtctgactccactacgctggtggcttctcgctactgggatctctccagcggctggcagcgtgccattaacctgcgctggagtctcgaccactttactcagggtgaaattaccaacaccacgatgctgttttatcctggggtgatgattagccgcacgcgttctcgtggtggcctgatgccaacctggggcgactcgcaacgctactctatcgactactccaacacggcctggggttcagatgtcgatttctccgttttccaggcgcagaacgtctggatccgcacactgtacgatcgccatcgttttgtgacacgcggcacgctgggctggattgaaaccggtgatttcgacaaagtaccgccggatctgcgtttcttcgccgggggcgatcgcagtattcgcggctacaaatacaaatctatcgccccgaaatacgctaacggtgacctgaaaggggcctcgaagttgataaccggatcgctggaataccagtacaacgtgaccggaaaatggtggggcgcggtgtttgtcgatagtggcgaagcggtaagcgatattcgccgcagcgactttaaaaccggtaccggggtcggcgtacgctgggaatcgccggtcgggccaatcaaactcgattttgccgtaccggtcgcggataaagacgaacacgggttacagttttacatcggtctggggccagaattatgagtttatggaaaaaaatcagcctcggcgtggttatcgttatcttactgttgctgggatcggtggcgtttctggtgggcaccaccagcggcctgcatctggtatttaaagcggcggatcgctgggtgccaggactggatattggcaaggtcaccggcggctggcgcgatctcaccttgtctgacgttcgttatgagcagccaggcgtggcggtaaaagcgggtaatctgcatctggcggtcggtcttgagtgcctgtggaacagcagtgtttgtattaatgacctggcgctgaaagacattcaggtcaacatcgacagtaaaaaaatgcctccttctgaacaggttgaagaagaggaagatagcggtccgctggatctctccacgccgtatcccatcaccctgacacgggtggcactggacaacgtcaacatcaagattgatgacaccacggtatcggtgatggacttcacctccggcctgaactggcaggagaaaaccctgaccctgaaaccgacgtcgctgaaaggcctgctgattgctctgccgaaagtggcggaagtggcgcaggaagaagtggtcgaaccgaaaattgaaaatccgcagccggaggaaaagcntntcggcgaaacactcaaagatctcttttctcgcccggtattgccggaaatgaccgacgtgcatctgccactcaacctgaacattgaagagtttaagggagagcaactgcgcgtgacgggcgatacggacattaccgtgcgcaccatgctgctgaaagtgagcagcattgacggcaatactaaactggacgccctggatatcgattccaatcaagggatcntcaacgccagcggcacggcgcagctgtcagacaactggccggtggatatcaccctcaacagcacactgaacgtggagccgttgaaaggtgaaaaggtgaagctgaaagtgggcggcgcgctgcgcgaacagctggagattggcgttaatctttccggtccggtggatatggatttacgcgcccagacgcgactggcggaagccggattgccgctcaacgtggaagtgaacagcaaacagatttactggccgttcactggtgagaagcagtatcaggcggatgatctgaaactgaaacttaccggcaaaatgaccgattacacgctctctatgcgtacggcagtgaagggactggagatcccgccagccaccattacccttgatgccaaaggtaatgaacagcaggtcaatctcgacaaactcaccgtcgcggcgctggaagggaaaactgaactcaaggcgttgcttgactggcagcaggccattagttggcgcggtgagctaacgcttaacggcattaacaccgccaaagagatcccagagtggccgtcgaaactcaatggcttgattaaaacccgcggtagcctgtacggcggcacctggcagatggaggtgccagaactgaaggttaccggtaacgtcaaacagaacaaagtgaacgttgacggcacgctgaaaggcaacagttatatgcagtggatgatcccagggcttcatctggaactggggccaaacagtgccgaagtgaaaggcgagctgggggtaaaagatctcaatcttgatgccaccatcaacgcgccggggctggataacgcgctgccggggcttggcggtacagcgaaagggctggtgaaagttcgcggcacggtggaagcgccacaactactggcggacatcaccgnnngcggcctgcgctggcaggagctaaccgtggcgcaggttcgcgtggaaggcgatatcaaatccaccgatcagattgcgggtaaactcgacgtgcgcgttgagcaaatttcacagccggatgtaaatatcaacctcgtcaccctgaatgccaaaggcagcgaaaaacagcacgagttacagttgcggattcagggcgagccggtttccgggcagcttaatctggcaggaagttttgatcgcaaagaagaacgctggaagggaactcttagcaatacccgcttccagacgctggtcggcccgtggtcgctgacccgcgatattgcgctggattaccgcaataaggagcaaaaaatcagcatcgggccacactgctggcttaacccgaatgcggaactgtgcgtgccgcaaactatcgatgcgggggccgaagggcgtgcggtggtgaatctcaaccgcttcgaccttgccatgctgaaaccgtttatgccagaaaccactcaggccagcggtatcttcacgggtaaagcggacgttgcctgggacaccaccgaagaggggctgccgcagggcagtatcaccctttcggggcgtaacgtgcaggtaacgcaaaccgtcaacgatgcggcgctgcccgtggcgtttcagacactgaatctgacggcggaattgcgtaacaaccgtgccgaattgggctggaccatccgcctgaccaataacggccagtttgatggacaggtgcaggtgaccgatccgcaaggccgccgtaatcttggtggcaacgtcaatatccgtaacttcaaccttgcgatgataaaccccatctttacccgtggggaaaaagcagcggggatggtgagtgccaacttgcgtctgggtggtgatgtgcaaagcccgcagttgtttggtcagcttcaggttacgggtgtggatatcgatggcaactttatgccgtttgatatgcaaccgagccagcttgcggtcaactttaacggtatgcgctcgacgcttgccggtacagtacgaacccagcagggtgaaatctacctgaacggtgatgccgactggagccaaattgaaaactggcgggcgcgggtaacggcgaaaggcagtaaagtgcggatcaccgtgccgccgatggtacgaatggatgtatcgccagatgttgtattcgaggctacaccaaacctgtttaccctcgatggtcgcgtggatgtcccttgggcgcgcatcgtggtgcacgatctgccggaaagcgcagtaggcgtctccagcgatgtggtgatgcttaacgataacctgcaaccggaagagccgaaaacggcgtcgattccgattaacagtaacctgattgtccacgttggcaacaatgtgcgcattgacgcctttggcctgaaagcgcggctgacgggcgatcttaacgtcgttcaggacaaacaagggctgggcctgaacgggcagatcaacatccctgaagggcgcttccatgcctatggtcaggatctgattgtgcgtaaaggtgagttactgttctctggcccgccggatcaaccgtatcttaatattgaagctattcgtaacccggatgctacagaagacgacgtaatcgccggagttcgcgtcactggtctggcggacgaaccgaaagcggagatcttctctgacccggcgatgtcgcaacaagctgccttgtcttatttgctacgtggacaagggctggagagcgatcagagcgacagtgcggcaatgacctcgatgctgattggtctgggggttgcgcaaagtggccagattgtgggtaaaatcggcgagacgtttggcgtaagcaatttagcgctcgacacccagggagtaggcgactcctcccaggtagtggtcagcggctatgtattgccaggtctgcaagtgaaatacggcgtgggtatatttgactctatagcaacactcacgttacgttatcgcctgatgcctaagctatatctggaagccgtgtctggtgtagaccaggcactggatttgctctatcagttcgagttttagcaatgcgaatatttgtctacggcagtttacgccacaaacaaggcaacagtcactggatgaccaatgcccagttactgggcgatttcagtatcgataactaccagttgtatagcctgggccactatccaggcgcagttccggggaacggaacggtacacggtgaagtttatcgtattgacaacgccacgctggccgaacttgatgccttgcgcaccaggggcggtgaatacgcgcgccagttgattcagacgccgtacgggagtgcatggatgtacgtttatcaacgacccgtcgatggattaaagctaattgaaagcggcgactggttagacagggataagtaaccctatgcatacgccaccttcgggtggcgttgttttttgcgagacgactcgcattctgttttgtaattccctcaccttttgcttttctctccgagccgctttccatatctattaacgcataaaaaactctgctggcattcacaaatgcgcaggggtaaaacgtttcctgtagcaccgtgagttatactttgtataacttaaggaggtgcagatgcgtattaccataaaaagatgggggaacagtgcaggtatggtcattcccaatatcgtaatgaaagaacttaacttacagccggggcagagcgtggaagtgcaggtgagcaacaaccaactgattctgacacccatctccaggcgctactcgcttgatgaactgctggcacagtgtgacatgaacgccgcggaacttagcgagcaggatgtctggggtaaatccacccctgcgggtgacgaaatatggtaaagaaaagtgaatttgaacggggagacattgtgctggttggctttgatccagcaagcggccatgaacagcaaggtgctggtcgacctgcgcttgtgctctccgttcaagcctttaatcaactgggaatgacgctggtggcccccattacgcagggtggaaattttgcccgttatgccggatttagcgttcctttacattgcgaagaaggcgatgtgcacggcgtggtgctggttaatcaggtgcggatgatggatctacgcgcccggctggcaaagcgtattggtctggctgcggatgaggtggtggaagaggcgttattacgcttgcaggcggtggtggaataaggtgtgtttatttatcgcgggcataaaaaaacccttactaaccgaagcccggcgttcagggttattacgccagaagaacttatttattctttgcgcgctcgaaggaggcaacgatttcagctttagcggcttctgcgttttcccaaccttcaactttcacccacttgcctttttcgaggtctttgtagtgctcgaagaagtgagcgatttgcgctttcagcagttcaggcagatcgttaacgtctttaatgtgatcgtattctttgctcagcttgctgtgcggaaccgcaaccagtttcgcatcttcaccggcttcgtcggtcattttcagaacgccaaccggacggcaacggatcacagaacccggctgcagcgggtacggagttgggaccagtacgtcaactgggtcaccgtccagagacagggtgtggttgatgtaaccgtagttgcacggatagaacatcgcggtggacatgaagcggtcaacgaacagtgcgccgctctctttgtcgatttcgtatttgatcggatctgcgttagccgggatctcaataacaacgtagatgtcttccggcagatctttacccgcagggacgttgagtaagctcatgtctgtttcctttaaaaatatgtggcaaacaagtgccgagtattatagccaactcgcgccgaatgtcttcgcttgttttcgtcttcattttcctttttcgccagttttaagacggtatgcagagcaggaaaatccataaccgtagccgcatttttcatagtgagatgaaagcgattacaaacttgtgattaacgttttatttacttttttgaagtgtgatgtaacgcaatccgttacataacgaattgtctatagttttttcgcgaacatcttttcaccaataataattactccgacgaggacaaccctatgtggaaacgcttacttgtagtctctgcagtctcggcagccatgtcgtctatggcgttggccgctccattaaccgtaggattttcgcaggtcggatcggaatccggctggcgcgccgcagaaaccaatgtggcgaaaagtgaggccgaaaaacgcggaattacgctgaaaattgccgatggtcagcaaaagcaggaaaaccagattaaagcggtacgttccttcgttgcacaaggggtggatgcgatctttatcgctccggtggtcgcgacaggttgggaaccggtattaaaagaggcgaaagatgccgaaatcccggtcttcttgctcgaccgttccatcgatgtgaaagacaaatctctctatatgaccaccgttactgccgacaacatcctcgaaggtaagttgatcggtgactggctggtaaaagaagtgaatggcaaaccatgcaacgtggtggagctgcagggcaccgttggggccagcgtcgccattgaccgtaagaaaggctttgccgaagccattaagaatgcgccaaatatcaaaatcatccgctcgcagtcaggtgacttcacccgcagtaaaggcaaagaagtcatggagagctttatcaaagcggaaaacaacggcaaaaacatctgcatggtttacgcccataacgacgacatggtgattggtgcaattcaggcaattaaagaagcgggcctgaaaccgggcaaagatatcctcacgggttccattgacggtgtaccggacatctacaaagcgatgatggatggcgaagcgaacgccagtgttgaactgacgccgaacatggcgggacccgctttcgatgcgctggagaaatacaaaaaagacggcaccatgcctgaaaagctgacgttaaccaaatccaccctttacctgcctgataccgcaaaagaagagttagagaagaagaaaaatatggggtattgagggttgctatgcctgatgccgattcgtaggccggataaggcgctcgcgccgcatccggcgatggtgcactgaagcctgatgcgacgcttaccgcgtcttatcatgcctactgggagcacgctttacaccgggggaaaccatgacgaccgaccaacaccaggagatcctccgcaccgaaggattaagtaaatttttccccggcgtcaaagcgttagacaacgttgatttcagcctgcgccgtggcgaaatcatggcgctgctcggtgaaaacggggcgggaaaatcaacgctaatcaaagcattaactggtgtataccacgctgatcgcggcaccatctggctggaaggccaggctatctcaccgaaaaataccgcccacgcgcaacaactcggcattggcaccgtctatcaggaagtcaacctgctacccaatatgtcggtcgctgataatctatttataggccgcgaacccaaacgcttcggccttctacgccgcaaagagatggaaaagcgcgccaccgaactgatggcatcttacggtttctccctcgacgtgcgcgaaccgctcaaccgcttttcagtcgcgatgcagcaaatcgtcgctatttgccgggctatcgatctctctgccaaagtgctgatcctcgatgaacccaccgccagtctcgacacccaggaagtggagttactgtttgacctgatgcgtcagttgcgcgatcgcggcgtcagcctgatctttgtcactcactttctcgatcaggtctatcaggtcagcgatcggatcaccgtcttacgcaacggcagtttcgtaggctgtcgggaaacgtgcgagctaccgcagatcgaactggtaaaaatgatgctggggcgcgagctggatacccacgcgctacagcgtgccgggcgaacattgttgagcgacaaacccgttgccgcgttcaaaaattacggcaaaaaaggaacgatcgcaccgtttgatctcgaagtacgccccggcgagatcgtcggtctggctggattgctgggatcaggacgtaccgaaaccgccgaagtgatcttcggtatcaaacctgctgacagcggcacggcgttgatcaaaggcaaaccgcaaaacctgcgatcgccacatcaggcttcggtacttggcattggcttctgcccggaagacaggaaaaccgatggcatcatcgctgccgcctcggtgcgggaaaatatcatcctcgctctccaggcccagcgcggctggctacgtcccatttcccgcaaagaacagcaagagattgccgaacgctttatccgccagcttggcattcgcacaccttcaactgaacaaccgattgaatttctctccggcggcaatcagcaaaaagtgttgctttcacgttggctactgacccgaccgcaatttctgatcctcgatgagccaacccgcggcattgatgttggtgcccacgccgagatcatccgcctgattgaaacgctatgcgccgatggtctggcgctgctggtgatctcctccgaactggaagaactggtgggctatgccgaccgggtgatcatcatgcgcgatcgcaaacaggtggcggagatcccgctggcagagctttccgttccggcgatcatgaatgccattgcggcgtaaggagaacagtgtgatgcctcaatctctcccggacactacgccgccaaaaaggcgctttcgctggccaacgggaatgccgcagctggcggcactgttgctggtgctgctggtcgatagcctggtggccccgcatttctggcaggtggtgcttcaggatgggcgtttgttcggtagccctatcgacattcttaatcgcgccgcccccgttgcgctactggcgattggtatgacgctggtgatcgcaacaggtgggattgatctctccgtaggggcggtgatggctatcgccggagccacaacggctgcgatgacggtcgcgggattcagcctgccgattgttttgttaagcgccctgggcaccggcatcctggcgggattgtggaacggcatactggtagcgatcctcaaaattcagccgtttgtcgccactctgatcctgatggtcgccgggcgcggcgtggcgcaactgatcacctccggacagatcatcacgtttaactcgccggatctctcatggttcggcagtggatcgctgttgttcctgccaacgccggtcattatcgcggtgctgacgcttatcctgttctggctgttgacccgcaaaacggcgctggggatgtttatcgaagccgttggtatcaacattcgggcggcaaaaaatgccggggtaaacacgcggatcatcgtcatgcttacctacgtgttgagcgggctgtgtgcggcgattgcgggcattatcgtggnggcggatattcgcggtgccgatgccaacaacgccggattatggctggagctggacgccattctcgcggtggtgattggcggtggttcgctgatgggcggacgttttaacctactgctttcggtggtgggggcgctgattattcaggggatgaacaccggaattttgctttcgggctttccgccagagatgaaccaggtggtgaaagcggtggtggtgctttgcgtgctgattgtccagtcgcaacgctttatcagtctgattaaaggagtgcgtagccgtgataaaacgtaatttgccactgatgatcaccatcggcgtctttgtgctgggttatctctactgcctgacccagtttcccggttttgcttccacaagagtgatctgcaatatcctgaccgataatgcctttcttgggataatcgccgttggcatgacctttgtgatcctctccggtgggatcgatctctccgttggttcggtgatcgcctttaccggcgtgtttctggcaaaagtgattggcgatttcggcctctcgccgttgctggcatttccgctggtgctggtaatgggctgtgcctttggcgcatttatggggcttttgatcgacgccctgaagatcccggcatttatcattactttggcaggaatgttctttttgcgcggcgtcagctacctcgtttcggaagagtcgatcccgataaaccatcctgtttatgacacgctctcaagccttgcatggaaaattcctggcggcggtcgcttaagtgcgatggggctgctgatgctggcggtggtggttatcggcatattcctcgcgcatcgtacccgctttggtaatcaggtgtacgccattggcggcaatgcgacgtcggcaaacctgatggggatttccactcgcagcacaactattcgcatttatatgctctctaccggactggcgacactggcggggattgtcttctcgatttatacccaggccggatacgcgctggcgggcgtaggtgtggaactggacgctatcgcctcagtggtgattggcggtacgcttttgagcggtggcgttggaacggtattagggacgctttttggcgtggcgattcagggactgattcagacttacataaactttgatggtacgctgagctcatggtggacgaaaatcgccatcggtattttgttgtttatttttatagcattacagcgtggattaacggtgctgtgggagaatcgtcagagttcgcctgtgacaagagtcaacattgcgcagcaataaaatcgcctctccgtgtggagaggcgcaggagattacgcgtccgggaactcacagataaagcgttcgacatcttcaaccatatggtcgttgccgacaaagaatgaacggcgctggtgcagggtttccgggataatatccagaatacgctctttgccatcgctcgctttaccgcccgcttgttccgccaggaatgccatcgggttgcactcatacagcaaacgcagtttgccgtccgggtggctggcggtgcttgggtagagataaataccgcctttcagtaggttacggtggaaatccgcaaccagtgagccgatataacgtgaggtatacgggcggttggtggatttatcttcttcctggcagaatttaatgtacttcttcaccccgttcggaaacttaatgtagtttccttcgttgatggagtaggttttgcctttctccgggaagcgcatccgttcctggcacaggcagaaaacgccgagcgaaggatcgtaagtaaaagcgtgaacaccgcatccggtagtgtaaaccagcatggtagaggagccgtataccacgtaacctgccgcaacctgtttgttaccaggctggaggaaatcttcttccgttaccggcgtgccgacgggcgtaactcggcggtagatggagaaaatggtaccgacagagacgttaacatcgatgttggacgagccatccagtgggtccatcagcaccacgtattttgcatgttcacagccttcaaagacaacaatctcatcttcttcttcagaggcaatgcctgcaacgatatcgcgtgctttcagtgcggctttcagtttttcattagcgaacaagtcgagtttttgctgaacctcgccctgcacgttctcagcaccgctggcacccaggatatcaaccagtcctgctttgttgatatcgcgatggataatcttggcgcccagttttattgccgacagcaaagcagtgagctcaccggtagcatgagaaaactcgtgctgcttttcgacaataaattcacctaacgttttcataaaactttccctgcaatgtttatggagtaaagcgaccgcaacaatcttaacaaataatctcaatgttgcgctcaggtgaatcgcgccagcaaattacggattatcctgaaatgcgtttctcacttgcccgacatatgcgtaaaatgagcggcagattaaaaaaggatagtgacgcatgcgcattcatattttaggaatttgtggcacgtttatgggcggtctggcgatgctggcgcgccagttaggccatgaagtaacgggttcggacgccaatgtgtatccgccgatgagcaccttacttgagaagcaaggcattgagctgattcagggttacgatgccagccagctcgacccgcagccggatctggtgattattggcaacgccatgacccgtggaaatccgtgtgtggaagcggtactggaaaaaaacatcccttatatgtcaggtccacagtggctgcacgattttgtgctgcgcgaccgctgggtgctggccgttgccggtacacacggcaaaaccaccaccgcgggaatggcgacctggattctggaacagtgtggttacaaaccgggctttgtaatcggcggtgtgccggggaactttgaggtttcggcgcgtctgggcgaaagcgacttctttgttatcgaagcggatgagtacgactgcgccttcttcgacaaacgctctaaatttgtccattactgcccgcgtacgctgatcctcaacaaccttgagttcgatcacgccgatatctttgacgacctgaaagcgatccagaaacagttccaccatctggtgcgtatcgttccggggcagggtcgtattatctggccggaaaatgacatcaacctgaaacagaccatggcgatgggctgctggagcgagcaggagctggtgggtgagcagggtcactggcaggcgaaaaagctgaccaccgatgcttccgaatgggaagttttgctggatggcgaaaaagtgggcgaagtgaaatggtcgctggtaggcgaacataatatgcacaatggcctgatggcgattgcagcggctcgccatgttggtgtagcgccggcagatgccgctaacgcgctgggttcgtttattaacgctcgccgccgtctggagttgcgtggtgaagcgaatggcgtcacggtatatgacgattttgcccatcatccgacggcgattctggcaacgctggcggcgctgcgtggcaaagttggtggtacggcgcgcattattgctgtgctggagccgcgctcgaataccatgaaaatggggatctgcaaagacgatctggcaccttcattaggtcgtgccgatgaagtcttcctgctgcaaccggcgcatattccgtggcaggtggcagaagtggcagaagcctgcgttcagcctgcacactggagtggcgatgtggatacgctggcagatatggtggtgaaaaccgctcagcctggcgaccatattctggtgatgagcaacggcggttttggtgggatccatcagaaactactggatggtctggcgaagaaggcggaagctgcgcagtaattcggcctcagcctgagatagtgtgcgtaggccggataaggcgttcacgccgcatccggcatttgagcatagtgcctgatgcgacgcttgatgcgtcttatcaggcctacaggtgcaccgcatccggcaaaccatactcacatcaacaacgaaaattacccttcattctccgccagttcgcgcagatactggaaaatctggcgtgcggatttcggcggcttattcccttctttctctttcttcgcgttgcggatcagagtacgcagttgctgacgatcggcatcgggccacagatttaatacctcagcgatggcgtcatcaccttgatcgatcagacgatcgcgcaggttttccagtttatggaacagcaccacctgctggttgtgacggtttttcagcttatccagcgcctgacggatcggttctacatcgcgctggcgcagcatcttaccgatgagctgcaactggcggcggcgaccttccatcttaatacgctgggcgagctcaatagccgcgcgcagatccgcatctaacgggatcttatccagcgcgtttttccccagatcaacaatttccgcgccaaggcgttttagctcctcggcatcacgtttaatttcacttttactgacccagataatttcatcgtcttcgtcttcgatgtcatcaccgggaacgtcgtcgagccagtcttcgggctgcttagtcatctcaggctccttaaaaaaagaggctaatgttaccagttaagatgcgcactgaaaaacggttctctgttagacttcagagaaactctctacattatggcacttgcaatgaaagtaatctctcaagttgaagcgcagcgcaagattctggaagaagcagtttccactgcgctggagttggcctcaggcaaatcggacggtgcggaagttgccgtcagcaagaccaccggcattagcgtaagcacgcgttatggtgaagtggagaatgttgaattcaatagcgatggcgcgctggggatcactgtttatcaccagaaccgcaaaggtagcgcatcatccaccgatttaagcccgcaggccattgcccgtactgtacaggcggcgctggatattgcccgttatacctcgccagatccctgtgccggcgtggcagacaaagagctgctggcctttgacgcaccggatctcgacttgttccaccctgcggaagtttccccggatgaagccattgaactggcggcccgcgcagaacaggcggcattgcaggcggacaaacgcatcaccaataccgaaggtggcagctttaacagccactacggtgtcaaagtttttggcaacagccacggcatgttgcagggttactgctcaacgcgtcattcgctctccagctgtgtaattgccgaagaaaatggcgatatggagcgtgattacgcctacaccattggccgcgcgatgagcgatttgcagacgccagagtgggtcggggccgattgcgctcgccgtactttatcgcgtctgtcaccgcgtaaactctccaccatgaaagcgccggtcatttttgccaatgaagtggcaaccgggctttttgggcatctggtgggggcgatagcgggtggatcggtttaccgtaaatctaccttcctgctggattcgctgggtaaacaaattctgccggactggctgaccattgaagagcatccgcatctgctgaaagggctggcatcgacgccatttgacagcgaaggtgtgcgcaccgagcgtcgcgatattattaaagatggcatcctgactcagtggctgctgaccagctactcggcgcggaaactggggctgaaaagcaccggacatgcgggcggtattcacaactggcggattgccggacaaggtctaagcttcgagcagatgctcaaagagatgggcaccgggctggtggtgacggaattgatgggccagggcgtgagtgcaattaccggtgattattcccgtggtgcggcgggcttctgggtagaaaacggcgaaattcagtatccggttagcgaaatcaccatcgcaggtaatttaaaagatatgtggcgcaatattgtcaccgtcggtaacgatattgaaacacgcagtaatatacagtgtggttctgtgctgttgccggagatgaaaatcgccggacagtaaaaaaactggcgcgacctgccgcgctataaactaaaaaattacacaaaatcattcgcactgcatcgagacggaaagtgaatgagggccggggagcgtactcgcagtacgtgacccggtcgaatgagcgtagtcgtcgatgangcagtgtgaaggatgaagtgtaaataaaaaaggaagtgagcaatgcgaaaaagcctgttagctattcttgcagtctcctcgttggtattcagttcggcgtcgtttgctgctgatcttgaagacaatatggaaaccctcaacgacaatttaaaagtggtcgaaaaagccgataacgcggcgcaagtcaaagacgcgttaacgaagatgcgcgccgcagcgctggatgcgcaaaaagcaacgccgccgaagctcgaagataaatcaccggacagcccggaaatgaaagatttccgccacggtttcgacattctggtcggtcagattgacgacgcgctgaagctggcaaatgaaggtaaagtaaaagaagcgcaggctgctgcagagcaactgaaaacgacccgcaattcatatcacaagaagtatcgttaattcctcatttccctgttgcctgcactcaggtaacagggaacttatcatcgcaaatgatgcaccacctgattgctgctgccgcgccagatcagggaagggtcttttaaatcctgcacaaatttgccgtcgaccagcacgttaatcaaatcaacaacctgcatttgcgcagcgttgagttcgtcgagtttatagcctgtccacacccagatgtctttacccggacactcggcgcggatgcgttgtaccagtttcagaatatccggcacgttttgcggatgcagcggatcgccgccggagagggaaataccctggcgtttgatacgagtgtcattcagatcgttaatgatctggtcttccattgctttagtaaatggctgaccggaatttacccgccatgtgcttttgttatagcaaccggggcattcatgaacacacccggagacaaacagggtgcagcgagtgccgggaccgttgacgatgtcgacaggatagtactgatgataattcattatttcgcctggcttatcagtccgcgtgtaggctgtatcaggcaatcaacgcctgatgcgacgctgtggcgtcttatcaggcctacagccgttgccaaatgtaggccggataaggcgtttacgccgcatccggcaatcaacgcgggatgcgacgctttcacatcacatccggcatttgcttagtgcagatcaacctatctgcccatttcccaaatgtttaacgcggcgcttaacttcttcctgcttgccggcgttaaacggacgtgcatccgggctacctaaatatccgcacacgcggcgagttaccgacacacgggaggcgtcatggttaccacatttcgggcaggtgaagcctttgctggtgcactcgaactcaccggtaaagccacactcgtagcactcatcaatcggtgtattggtgccgtaatacggtacatgctgatagctgtaatcccagacatcttccagcgccttcaggttgtgctgaatgtttggatactcgccgtagcaaatgaaaccaccgttcgccagcggcgggtaaggcgcttcaaagtcgatcttgtcgtacgggttcaccttcttctccacatcgaggtggaaactgttggtgtagtaacctttatcggtcacgcccggcaccacgccaaactcagcagtatcgagacggcagaagcggtcgcacaggttttcactcggcgtgctgtagagactgaaaccataacccgtttcttctttccactgatccactgcctgacgcagacgttcaacaatggcgatacctttcgcgcggagctgctcgttgtcgtaaacatgttcgccgccgaacagcgcgttaatggtttcgtggatgccgatgtaacccagcgaaatagacgcacgaccgtttttgaagatttcagaaatatcatcgtcagcattgagacgcacgccacaagcaccttccatatagaggatcggggccacgcgcgctttcacgccttcgagacgagcgatacgggtcatcagagccttacgtgccagcaccagacgttcatccagcagcttccagaaggtggcttcatcgccttttgcttccagagcaatacgcggcaggttcaggctgatcacgccgaggttgttacgaccatcgtggatctgctcgccgttttcattttcccacacgccgaggaagctgcggcagcccatcggggttttaaacgaaccggtgactttcactacctgatcgtagttcaggatatccggatacatgcgcttgcttgcgcactccagcgccagctgtttgatgtcgtagttcggatcgccttttttatggttcagaccatcgcgaatcgcaaacaccagtttcgggaacaccgcagttttacggtttttaccgaggcctgcgatacggttacgcaggatagattcctgaatcaggcgcgactcccagctggtgcccagaccaaaaccaaaggttacaaacggcgtctgaccgttggcggtgtgcagggtgtttacttcgtactccagcgactggaaggcatcgtagcactctttaatggtacgagagttagcgtagccttcggcgtccgggatgttccactcttctgcggtcttgcgatgtttgttgtagctggcggtgacaaacggtgccagcacttcatcgatacggttaatggtggtgccgccataaatatggctggcaacctgagcaataatctgcgcagttaccgcggttgccgtagagatcgacttcggcggttcaatctcggcgttccccatcttaaagccctgggtcagcatgcctttcaggtcgatcaacatgcagttgaacatcgggaaaaacggtgagtaatcgagatcgtgatagtgaatatcgccacgctcatgtgcctgcaccacgtcacgcggcagcaggtgctgacgtgcatagtgtttagccacgatcccggccagcaggtcgcgctgggttggaatcaccttgctgtctttgttggcgttttcgttgagtaacgaggcgttggtctgctcgaccagaccacggatctcctgattcaggcgaccgcgtttttcacgttcaatgtcgcgatcgtgacggtactcgatgtaagcacgagccagttgtttgtatggacctgacatcagctggttttcaacagcggtctggatctcattgatatccacctggttgcggccctgcatctgctcgctgacaactgcagcaacagtggcgcaataatcggcatcatcgacttccgctgctttagctgcacgcagaatcgcttctttgatgcgctctgatttaaacggcactttgcagccgtctcgtttcatcacatgcggtgtcatgatcgctccatatttttaagaacaggttatccacagaaattgggaaaggcgttttccggttttttcgtttcgttttccggtgctttccgcaatcgccatccgcttatccacaacgccgcacctttttcgtggggagctgtagtagcaattatagtcgattaatacaacatattgggttgggacgcattttaaagtctatatatagtgctttgcatcaaggatgtttgaactttttttgatgtagctcaaagtaaaaagcagagcgtacggatgacgggcgctacagcgttatgtaaattttttaatgaatttgctggttgaaaaatcaacaaaaacaacatgctgacagacaaaaccccggaatgaccggcattaccggggnttagggaagatttanttctgtaaccaccagacagcntcaaaaggccgtaaagtcatggcacagggttgtggtgaggcttcttcgtagttatgcatcacaagctgccagttgccgcgcatttgccctggctgccagggttggatctcacggctaaggttggcaatgaccagcaaggtttgccccttccattcacggcgatagcaccacaatacagggctgtttggcagcagatcctggtaattgccccatgtcaggatggcttcctgcttacgcagtgcgattaacttttggtaggtgtaaaacaccgaggactcatcggccagcgcggcttctacgttgatttgttgatagttatcgcctaggccaatccacggttcgccagccgtaaacccggcattatcgccgttgctccattgcatgggcgtgcggctgttgtcacgggatttactggcgaggattgccaataantcgtcggcatcacgcccatcgttgcgcagctcggcaaacatattgaggctctctacgtcgcgatagtcagtaatgcgcgtgaaatgcgggttggtcatgccaatctcttcgccctggtagatatacggcgttccctgcatgccatgcagcaccatcgccagcatttttgccgcaggcacgcggtattcaccttcatcaccaaagcgagaaacaatgcgcggctgatcgtggttgcaccagaacaaggcattccatgctacgttgtgcattccttgttgccagtggcggaacaatgttttcaacgccacaaagtcaggtttagccagcgtccatttttcaccaccgggataatcgaccttcaggtgatgaaaattaaaggtcatcgacaattcactgcctgtcagtgccgcgtatcgctggcaatgctcaaggctggtggaggacatttcacctacggtcattaacccgcgtggcgtaaacacatcgcggttcatctcgtgcaaaaactcgtgtgctcgtggcccgtcggtgtagaagcgacgcccgtcgccatccaggtcatcagggaaacgcgggtctttggagatcagattcaccacatccaggcgcaacccgtcgaccccacgatcggcccagaactcacagacttttttcagctctgcgcgtaccgctggattctcccagttgagatccgcctgttctggtgcaaagagatgcaaatagtactgttcgctttccgcatgccagcgccacgcactaccgccaaattttgaacgccagttgttcggtggcgtttctggttcgccatcgcgccagatataaaactggcggtaagggctttctttgttcagcgcctcgcgaaaccaggcatgttgggtagaggtatggttaaacaccatatcgagaatgatacgaatcccgcgcgattttgcctgcgtcaccagttcgtcaaaatcgtccagcgtgccgtaggtgggatcaatcgccgtatagttcgctacatcgtaaccgttatcgacctgcggagagacataaaagggggttagccagatggcatcaacgcccagtttatgcagatagtccaggcgttggataacgccacgtaaatcgccggtgccgctacccgtggtgtcctgaaaactctttggataaatctggtagataacgccgttttgccaccagtggggaagattagtcattacgttattcctgcaaatgcgagggg

SEQ ID NO: 1680 - DNA, 3847 bp, Escherichia coli
  Strain O55:H7
  modified_base (169)..(169): a, c, g or t
  modified_base (2423)..(2423): a, c, g or t
tgcgccccgaagaaaattaaacaatgtccagcgtgcccaggcggtatttccgctgatagataaacgaggtgagtacaatcgggatgatgatggcgatagccattgccagcgcaaacacctgccagtagctcggttgaatcgagagaattcccggcaggccgcctacgcngatgccattcgccataacgccgttcaggccgcatagcaatcctgccagaccagaaccaatcatcgcgcacagcatcgggaagcgatatttcaggttgatgccgtacattgcaggctcagtgaccccaagccaggcggagatcgccgcaggcacggagatctcgcgttcattgtgcttgcggctggaaatgataatgcctatcacggcggagccctgagcgatattcgacagcgcaatcagcggccacactggcgtaccacccatgctttgaatcatctgcaaatcaatagcaagcgtggtctggtgtacaccggtgatcaccagcggggcgtacaggaagccaaacaatgccgcgccaatcggagcaaagctgccggtcatcaggtgacgtaccgcaaaggcaacgccatcgccaatcatgcgaccaaacggagcaatcagcgcatgggcgaggaacaccgcgaggatcagcgaacagacgggcaccaccaccagatagaggtaatccggcacgatgcgtttaaggcgagtttcaataacgcccagcgccagcccggctaacagtgccgggatcacctgcgcctgatagcccactttggcgatgctgaacatgccaaagtcccacacttccggcagctgctgcccgagcagataagcgttcatcagttggggggaaaccagtgtcacgccaagcacgataccaaggatcggcgtgccgcccatttttttcaccgctgaccagcaaatcccgaccggcaggtagaagaagatcgcttcaccgatcaaccacagaaaatcgtagatcgtttgcagggaagggtacatttgcgccagcgtttgaccgttgctcatgggcaaatcgccgatcacattgcgaaaaccgaggatcaaaccgccgctaatcaacgcgggcagcaacgggaagaagatctctgcgaaatgagagatcaactgctcatgccatttcatattctgccgggcggctttttttacctgctctttatcaacctgcgcctgtccggttgacgctatcagtgcttgatagtaatcacccacgttggtgccaatcaccacctgaaattgcccggcattggtgaaacagcctttcaccatggggagttgctcaatttctttcggtctggcattggccggttggttgaggacaaagcgcaggcgagtaatacagtggctcaccgtcgcaatattgccgcgcccgccgaccagttcaatcaaccgatcgatatccgtttggtttattttgctcatcataaagccccatggcagatgacatttttggttggctgcagaatatattgcgcggaaaaatttaaaaacgggaacgttcccgaaacgcagcgaagatcacaatttatcgttcaggaaacgatcaggacaggttggcggggatgatgatttgttgcggttcgctgcgtccggttacctgcgcgatcaactggcaagccgcctggcgtccagcttcggcgtaaccaggatctacggtgacgatctccggatgaaggaatttcattaacggcgtattaccgacgctcgccagttgcaaggtgtcgatgcgttgctcttgcaggtatttacttgcgccaagtgccagcgtgtcggttgcgcacagtaaggcggtagtttcaggcgtaatcacttttgctacgttctcatagccttgcttcatagcaagccctggcagggcggcaacgggatgcagtttatgcgctttgcagaacgccaggtaggcttcgtgacgtcgcttaccggttgtcacgtcactgtgcggcacgccgagataactgatattacgatgcccctggtcatacagccgttgcatcaggatcttgattgccccttcgtcgtcataacagaccgaagcaaagccttttgcgtcacgcgccagcagaaccagcgatgactgccagtgggctaacatttcttctgttatgccagtaaaaccgaacagcactacgccgtcgatattacgccgtttcagcacccccaaatgttcggcaactaattgcggggaaaactgactttccatcatgattgggtcgtaaccttgttcatagaacgctggcagcatggtttgaacggcgagattttctgacaacgaatccagacgggtaacaatgatggcgaccactttatcgctttgcccacgcatagcgcgcgcagaacgggaaggggaaaatccatgctgattcatcactgcttcaacacgctcgcgggtgcgctggctcacgccgctttngttattcagcacccgggaaactgtagatttccccacgccgcttaagcgcgcgatgtctttgatggtcagccgattttgcatcctgttgtcctgtaacgtgttgtttaattatttgagcctaacttacccgtgcattcagcaatgggtaaagtctggtttatcgttggtttagttgccagcaggtattatatcgccatagatgctacgaatattattggattctccttattatttgcggcgcttttttcacttaccggaggttatatggaacctgatcccacgcctctccctcgacggagattaaaacttttccggtaagcccgtcttttcacggcgttaccggatgcgtaaggccgtgacgttttaacgtccctgctcagctttattaccttcaggtaaggcttcgccacgcctgaagacatttctgtactgtttcagacagtgcggagggactccttatgtttaaagaaatttttacccggctcattcgccatttaccttcccgtctggttcatcgtgatccattgcctggcgcgcagcagacagtgaatacggtggtcccgccgtccttaagtgcgcattgcctgaaaatggcggtgatgcccgaagaagaattgtggaaaacgttcgacacccatccggaagggttaaatcaggcggaagtggaatctgcccgcgaacaacatggtgaaaataaattacccgcacaacaaccgtcgccgtggtgggtacatttatgggtctgctatcgcaacccctttaatattttactcaccattctcggcgctatttcttacgccacggaagatttatttgccgcgggcgttatcgcgctaatggtcgctatttcaacgttgctgaactttattcaggaagcacgttccactaaagcggcagatgccctgaaagcgatggtcagcaataccgcgacggtgctgcgcgtaattaacgacaaaggcgaaaatggctggctggagatcccgatcgaccagctggtgcccggcgatattataaaactggcggcgggagatatgatcccggcagatttacgtatcttgcaggcgcgggatctgttcgtcgctcaggcgtcgttaaccggtgagtctctgcccgtggaaaaagccgctaccactcgccagccggagcacagcaatccgctggagtgcgacacgctgtgttttatgggcaccaccgtggtgagcggcacggcacaagcaatggtgattgctacaggtgccaatacctggtttggtcaactggcggggcgtgttagtgagcaggaaagcgagccgaatgcctttcagcaagggatcagccgcgtcagtatgctgctgattcgctttatgctggtgatggcaccggtggtgctgttaatcaatggctacaccaaaggcgactggtgggaagcggcgctgtttgcgctt

SEQ ID NO: 1681 - DNA, 7436 bp, Escherichia coli
  Strain O55:H7
  modified_base (35)..(35): a, c, g or t
  modified_base (676)..(676): a, c, g or t
  modified_base (2244)..(2244): a, c, g or t
  modified_base (3639)..(3639): a, c, g or t
  modified_base (5883)..(5883): a, c, g or t
  modified_base (5912)..(5912): a, c, g or t
  modified_base (7194)..(7194): a, c, g or t
  modified_base (7428)..(7428): a, c, g or t
  modified_base (7430)..(7433): a, c, g or t
gcctaacgccggaaatgttgccgatgattgttacntcgacgctggcgcgcggcgcagtaaagctgtcgaaacagaaagtgatcgtcaaacatctggatgctattcagaactttggcgcaatggatattctgtgcactgataaaaccggcaccctgacacaggataaaattgtgctggagaatcataccgatatctccggtaaaaccagcgaacgcgtgctgcatagcgcgtggttgaatagtcattatcagaccggacttaaaaacctgctcgatacagcggtgctcgaaggtacggatgaagagtcagcgcgctcgctggccagtcgttggcaaaaaatcgatgagattccgtttgatttcgagcgtcgccggatgtcggtggtagtggcagaaaataccgagcaccatcagctggtttgcaaaggtgcattgcaggaaatcctcaatgtgtgttcgcaggtgcgtcacaatggcgagattgtgccgctcgatgacatcatgctgcgtaagattaagcgggttactgatacgctgaatcgtcaggggctgcgcgtggttgcggtggcgacgaaatacctgccagcgcgtgaaggagattaccagcgggcggatgaatccgacctgatcctcgaaggatatattgctttccttgatccgccaaaagagacaaccgntccggcactgaaggcattaaaagcgagtggaattaccgtaaaaatccttactggcgacagtgagttagttgcagcgaaagtgtgccatgaagtggggctggacgcgggagaggtggtcattggtagtgatattgaaacgctatctgacgacgaactggcaaatcttgcacagcgcactacgctgtttgcccgcctgacgccgatgcataaagaacgcattgtgaccttactgaagcgcgaagggcatgtggttggctttatgggcgatggtattaatgatgcgcccgccttacgcgctgcggatatcggcatttctgtggacggcgcggtagatattgcccgtgaagcggctgatatcatcctgctggaaaaaagcctgatggtgctggaagagggggttattgagggacgtcgcactttcgccaacatgctgaaatacatcaaaatgacggcgagttctaacttcggtaatgtgttcagcgtgctggtggcgagtgctttcttgcccttcctgccgatgttgccgttacacttgcttattcagaacctgctgtacgatgtgtcacaggtggcgatcccgtttgataacgtcgacgacgagcaaattcaaaagccgcagcgttggaatccggcggatctggggcgctttatgatcttcttcggaccgatcagctcgatcttcgatattctgacgttttgcctgatgtggtgggtattccatgccaacacgccggaaacgcaaacgctgttccagtcgggatggtttgtggtgggcttactgtcgcaaacgctgattgtgcatatgatccgcacccgccgtgtgccgtttattcagagctgtgcatcgtggccgttaatgatcatgaccgtgatcgtgatgattgtcgggatcgcattgccgttttcaccgctggccagttatctgcaattacaggcgctgccgttaagctatttcccgtggctggttgcgattctggcagggtatatgacattaacccagttggtgaaagggttctatagccgtcgttacggctggcaataaagaataaactgggcacgatagccccgattcagattgcagacaaagtaagctttgttcatgccggatgcggcgtaaatgccttatccggccaacaaattcaataaattgcaggaatcacgtaggcctgataagcgtagcgcatcaggcgattttgcgtttgtcatcagacttaatccgggcatgatagcccggatttccatcaagattagcgacgaacagcgatcgcttcgatctcaatcttcacgtctttcggcagacgggcaacttcaacgcaagaacgtgccgggaaggtggcgttgtgttcggtgaagaaggcttcgtaagtggcgtttacggttgcgaagtcgttcagatcttttacaaacacggtagttttaacgatgtcgcccactttcagaccagcggcttcgacgatcgcttttacgttatccagcgactgacgtgcctgtgcagcgacgtctgccggtacttcgcccgttttcggatttaccgggatctgaccggaagtgatgatcatattgcccanatcaacgccctgtacgtaaggaccgatagctgccggtgcattttccgtcgcgatagttttgctcatgatttctcctttattacagcggtaaaaagtctggctcattatagggagccagacttttattaccaaccgcaattaattggccagcaccacattatgggaaaactctttttcacagtatttgcatttgagcgcgatatcattggcgcgttttcgcacggcaaagctggaagaaaccggttcggcatggctgatacagttgctgttcgggcagaccagcacattgtcgatgcgctccggcagacttgggcgcgatttacccaccacttcatagttgtcgatacggttaaccgtggcttgcggcgcatacaatgccagttgatctacctggtcttcactcaaaaaggtattttcgattttgatcagatctttgcggcccatctcgccagaaggcaggttcagaccgatggtgatgcgctgatccgtttcggtcagcttgaacagactcaacagcttaaaaccgatctgggcggggatatggtcaattaccgtgccgcgtttaatagcttcaacctgcaatttattatcgtgtgtcatctctatttccccttacagtaccagatcgcgattcagaaccagtgccagtaacgcctggcgagcgaaaatcccgttgcctgcctgctggaagtaccaggcgtgtggcgttttatcaacatccgtcgcaatctcatcaacacgcggcagcggatgaagtactttcatattggctttggcgttgtggagatcgctggcgcgaagaacaaactgcgctttcacgttggcgtactcggacgggtccagacgctctttttgcacgcgggtcatgtacaggatgtcaacttccgccatcacttcttcaatagagctgtgcagactccatgcgatccctttttcatcaagcatatccagaatgtattgcggcattgccagcgcgtccggcgcgatgaagtaaaaacggttgccgtcgaacttcgctaacgcctgagtcagggagtgaacggtgcggccatatttcaggtcaccaaccattgcgacgtggagattgtccagacgcccctgggtttcctgaatggtgaataagtccagcaaggtttgcgtcggatgttggttggagccatcaccggcattcagtaccggtacattgccggaaaactcggtggccaggcgcgccgcaccttcctgcggatgacgcatcactatcgcatcgacgtaagtgctgataaccgaaatggtatcggccagcgtttcgccctttttacccagtgatgtattggcgctgtcggagaagcccaccacgctggcacccaggcggtgcatggaagtttcgaaagagaggcgggtacgggtagaggnttcgaagaaacagctggcaatgactttgtgcttcaacagctctggttgcgggtttgctttcagtttcgccgctgtcgccagcaccagattaaggtcatcgcgactaaggtcgtttatggaaatgatatgtttctgatatagcggattagccatcttttatctcctgacgcctgggcaaaaaaaagcccctcgattgaggggctgggaatgggtgatcaacgggaagaaaaacggcaggccagcgtcttttttcagacgcggtaagacaaaatgtcgaacacactgaaccatacatcctcccggcaaattgtccggcattatactcatcgtcagaagcggtgcaagcatttgatgcaatattttgtcagcgcaaacggtttatttgaattataagtcaaaatatatgcatttttatttactgtgattctggaggggaactgtcgttcggtatcaataattgcagacatttcctgcttttttctttttcactttcacgcaatcagatatgcattttattccattcatccgacttatagggcggagtgtgaaaacgaacggctaacactattgcttacagctcagggatgcgcgctatcactttaatttcaaaatcaaagcctgccagccatgtaacgcccaccgccgtccaggttggataaggtggcgcgctaaatatttcatttttcaccgtcatgatgtcttcaaattgtttttctggatcggtatgaaagctcgtaacatcaatgatatcgtcaaaagtgcatcccgcagctgccagggtcgcatgcaaattatcaaatgccagtctgacttgttgctgaaaatcgggttctggtgttccgtcctctcgacttcctacttgcccggaaacaaacagcaaatcgccggaacgaatagccgcagaataacgatgttctgcatacagtgaatgtcggccagcagggaaaacagcggttctttctaccatttggttatcctcaagatttacgacatgaacagaagatttatatttaccaggagccgcttttagcggacgacgtgagtaaacaaaacccagacatcatgggaaatggctgggcttaattgagcgtagtcggttatgcgccaaacgcgccatcaatggtatgcatcgcgccggtaacaaaactggcttctggccctgctaaccatgcgaccataccagcgacctcttccggttgcccatgtcttttgatagccataaaactatgcaacatatcgcgcattggcccgttggcgggattagcgtcggtatcaattggccctggctggacgacgttgatggtgatcccacgcggtccaaaatcacgggccagcccgcgcgccatgccttgtagggcagatttactggcggcataagcagccatgcctgcaacaggcatacgatcgccattcacggagccgatgattaagatgcgcccaccttcgggcatctgccgggcggcttcaacagaggcatggtaaggagcatgaatattgattttgaaaaggcgatcaatatcgtcggcatttaattccagggcatcgccaaagacgccaatacctgcatttaccaccaggatatccaatgcgccgctcttacgaacgacatcaatgacagcgtctctgtcagcactatctgtaaatactgctgtcgctcccgtctcttgtgccaggcgttcagcggcatctttcgaccccgcataggtgaatcgtacattggccccatcggtgacgaaacgacgtacgatagcggcaccgattccacgactgccaccgaggatgagaactgtcttacctgtaaaagcgcccataaggactccttgatttattatgtaacatgcattacaaaactgttttaactttctgtcaacaagttttgtaatggtcactaaaaaacaatctcgcgttccaggtcgtcccagacgtttcgctcctgagcaggcagtctctgcggcaaaagtgctttttcaccaaaaaggtttcgatgctgtcagtgttgctgaagttactgattatcttggtattaaccccccgagcctctacgcggcttttggcagtaaggctgggttatttagccgtgtactcaatgaatatgtcggtacggaagctattccgcttgtcgatattcttcgtgatgatcgtccggtaggggagtgcctggctgaggtattaaaagaagcggcgcgcagatatagccaaaacggcggctgcgctggctgtatggttcttgaaggcattcatagncatgatccacaagcgcgtgatattgccgntcaatattatcacgccgcagaaacggccatttatgactatatcgccaggcggcatccacaaagcgcacaatgtgtgactgattttatgagtaccgtgatgtcagggctttctgcgaaggcacgagaggggcactccctcgaacaactctgtgcaactgctgcactggcgggggaagcgataaaaactattctcaaggagtgatgctggccttgatccgaaaggcgggaacgcgcctgccgataagttgtgataagacaataattcacgcgttaaggctggcggaattgatcatcttttcgtataacggtggaaatgaaacattgttttaattaaggagtggaaaagatgatcatcggaaatattcataatcttcagccgtggctaccccaggagttacgccaggcgattgagcatatcaaagcacacgttacggcagaaacgccaaagggcaagcacgatatcgaaggtaatcgtctgttttatcttatctcggaagatatgaccgagccgtacgaagctcgccgtgcggagtaccatgcccgctatctcgacattcagattgtgttaaaaggtcaggaaggcatgaccttcagcacacaaccggcaggtacgccggataccgactggttagctgataaagacatcgcatttttgccggaaggcgttgatgagaaaacagttatccttaatgaaggtgattttgttgtgttttatccgggggaagtgcataaaccgctgtgcgcagtgggtgcaccagcccaggttcgcaaagcagtagtgaagatgctgatggcgtgatgacttttcgccgtaaataactccaggtttacggcgagtttgtgaaaagagcgttttttgatatttttttgtgagtaaaatttgtaatgcttagacgttcttattaactcaaggagttcgtcatgagcaaaatatcagatttgaattattctcaacacattacattagccgacaattttaaacaaaaaagtgaagttttaaatacctggcgtgttggaatgaataattttgcccgtaatgccgaggggcaggataacacaagaaatatccttaatcctaagacatttttggagtttttggtaaaaatatttaccctgggttatgtggattttagcaaacgctccaacgaagcgggaagaaatatgatggctcatattgagtcctcatcttatatcaaaaataatgatggcagtgagataatgaagtttgttatgaataatcctgaaggggaacgagcggattcacccaaggtgattatagaantttcactttccactattactactatggggactcgtcaaggacatacagccattatatttccacaacctgatggttcgactaaccgttatgaaggaaagtcctttgaaagaaaagatgagagttcattacacctgattactaacaaggttctggcgtgttaccaacgcgaagctaacaaggaaatagctcgtctattaaataatcatcagaagttaaataatctacagaagttanannnncta

SEQ ID NO: 1682 - DNA, 16892 bp, Escherichia coli
  Strain O55:H7
  modified_base (4)..(5): a, c, g or t
  modified_base (27)..(28): a, c, g or t
  modified_base (32)..(33): a, c, g or t
  modified_base (1002)..(1002): a, c, g or t
  modified_base (3009)..(3009): a, c, g or t
  modified_base (3152)..(3152): a, c, g or t
  modified_base (9986)..(9986): a, c, g or t
  modified_base (11593)..(11593): a, c, g or t
  modified_base (13443)..(13443): a, c, g or t
  modified_base (15002)..(15003): a, c, g or t
  modified_base (15649)..(15649): a, c, g or t
aagnnaaataatctacagaagttaaannatanncagaagttaaataatatacaggagttaaataattcgcaggagttaaataattcccaggagttaaataattcgcaggagttaaataactcgcaggacttaaaaaattcgcaggtgagttgtaaaggttcagttgattttacgattgcggatttattagaaaaatcattgaataatgcattattagcaataaggaacgaacatctgctattaatgcctcatgtatgtagtgaatcgatttcatacttactgggcgaaaatggtatacttgaagaaatagataagctctacgaattaaatgatcacggaattgataatgacaaagaaggtaacaatgaaattaatgacatcatgattaacctgtctcatattcttattgaatccttagatgatgcaaaggttaatcttacaccggtcatccattcgatgttgatgacttttttagaattgccatataataatgatgtaaaaatactggagtggtgttttaataaaagcatgcaatattttgatgattctgcaaagatagagcatgcatgctccgtaataaatcatattaattttcgtcgcgatcagtctaaagtagctgagacattatttttcaatctcgataaagaaccctataaaaatagccctgaattacaggagttgatttggaaaaagttggttgtatatgtcaatgattttaacttaagcaatcgagaaaaaacatatttaatacaaagaatatttaataatgttgagtcactatttaataaagtacctgtcagtattttagttaatgatatttttatgaatgatttttttatgaaaaacactgagatgattaattggtacttccctcggttacttaagagctatgaggatgaaaagatttattttgataagttagggtataattttaataataaagagtctaatgaagagattatgaaaaatcaaccaaaagatgttattgaagaaaaacttaanaatgaattaaaacttaggtttagaatgatgcaaactatcttgaaatcggaggttaatgtatcgccatttattgaccaacagcgtttaaatacactaaatcctccggaaaatttacgtatagcaatagaaaaatttggctggaagaaaaaaactatcactgcataaaataatgtgacgccgggatgtttctgtatttcccggcatctttatagcgatatcaattatttactgagtgtcgcgaccatcaccgctttgatggtgtgcatgcggttttccgcctgatcaaaaacaatgctggcggcagattcgaagacctcatcagtcacttccattccgccatgtaggccaaactcttccgccattttcttgccaagcgtcgtttggtcatcatggaacgcgggcaggcagtggaggaatttgacctccgggttaccggtcaactgcatcatcttgctgttcacctgataatcacgcagtaatgcaatgcgttcagcccatttttcttttgcttcacccatcgacacccatacatcggtatagataaagtcagcaccttcaacgcctttagctacatcttccgtcagcgtaatattcccgccattttgttgtgccagggcgcggcattccgtaaccagcgcagcttccggccagcatgcctgtggcgcgaccagacgcaaatccagaccggtaagcgccgcagcttcgagcatcgaattgcccatgttgttacgtgcgtcacctgcatagaccagcgtcatttcgttgaatggtttaccgggtaaatgctcctgcatggtgaggagatccgccagcaactgcgtggggtgaaactcattggtcaggccgttccataccggcacgccagcgtattccgccagtgtttcgacaatctcctgaccatagccgcgatactgaataccgtcatacatgcgacccagcacgcgggcagtgtctttaatcgactctttatgaccaatctgactgccgcttgggccgagataagtaacgcgagcaccctggtcatatgcggcaacttcgaaagagcatcgggtacgggtcgagtctttttcgaagatgagcgcgatgtttttaccagtgagtttggcttcttctttgccgcttttcttatcggctttcagcttcgcggctaactgcagcaggctgttgagttcagctggcgtgaaatcgagtaatttcaggaaatgcttatgataaaacccggacatagatccctcctgtggctaacgtctcaatgaattaaaattcaatttatatggatgattattcatttgcaagtctaaagcataaatctttgtcacaaaggtggaggcaatgccagtggtgtgtgacaatatgagtatcggcaggacattaagaggaatgagccatggcaaacccggaacaactggaagaacagcgtgaagaaacacgtttgattattgaagaattactggaagatggcagcgatccggacgcgctgtacaccatcgaacaccatctttccgcagacgatctggaaaccctggaaaaagcagcagttgaagcgtttaaactcggttacgaagtgaccgatccagaagagctggaagttgaagatggtgatatcgtgatttgctgcgacatcctcagcgagtgcgcgttgaatgccgatctgatcgatgcccaggttgaacaactgatgacgctggcggagaaatttgacgttgagtacgacggttggggcacttactttgaagatcccaacggcgaagacggcgacgatgaagattttgtcgatgaagacgatgacggggttcgccactaattaattgattaaaatgcccgatagcacacactagcgggcatttttttagagttcgcgtagcatccgcacttcacaatcaacatggcccgtgcagccaagtgcatagtcgatatgttgaaaacctaaatgttcatacaaaccaatcgcttctttcaaaaaagcggtcgtttccagatagcagcgtttgaagcccatttctcttncctcctccatcgcctttaaggccagtttttttgccagccctttgccgcgaatagccggaagaaaatacatcttttgcagttcgcaaatgtccgattcactacctgctaatggcgcaatcccaccgccgccgaccacttcaccntcgtactcaaccacccaatatgcatgacccggctgactatacacttgatacagctcgtcaagattcggatcggcgacggtgtagcctttatcagcggtaagaccgtattcggcggatacctgacgaatgacgcgggcgatagcaggattatcctgcagcgtcaggcgacgcattacaggtgattgcggcgcaatgttattcatagtttaacccaataaaaataaagtaattatacatttgtttaataccactctcttcttacgtgcgcaagcgtcttataaagcaataaagtttttgccagcctattactgataagagtattgtaacgtggcagaacattttactgtctgtatctataaattatatcaatggattttttaattcagggaatttttatggctcaagttattaatgaaatggatgttccgtcccattcgtttgtttttcatggtacaggtgagagatattttcttatttgtgtggtgaatgtgttgttaacgattataacgctaggtatctatttaccatgggcattaatgaaatgtaagcgttatctctatgctaatatggaagttaacggacaacgattttcttatggaattactggtgggaatgttttttttagttgtcttgtttttgtttttttctatttcgcaatcttaatgacagtgtcagcagatatgccgcttattggctgtgttttgactttgtcactgttggttttgcttatatttatggcagcaaaaggactgcgttatcaggccttgatgaccagtctcaacggcgtaagatttagttttaatttctctatgaaagggttctggtgggtaacctttttcttgccgattttaatggccattgggatggggactgttttctttatctcgacaaagatgctacatgccaatagttcaagtagtgttattgtatctgtggttctgatggcaatagttggtattgtttccattggtatttttaatggtactttatatagcctggtaatgagttttctctggagcaataccagtttcggtatacatcgtttcaaggtgaaattagatactgcgtattgtataaaatatgccatcctcgcatttttagctttattaccttttctcgctgttgctggttatattatcttcgatcaaatattaaatgcgtatgatagttctgtgtatgcaaatgatgatattgagaatttacagcaatttatggaaatgcaacgtaaaatgataatcgcgcagttaatctattattttgggattgctgttagcaccagttatttaacggtgtcgttgcgaaatcattttatgagcaacctgtcactgaatgatgggcgtattcgttttcgctcaactttaacataccacggtatgctttatcgcatgtgtgcgttggtggtgatatccgggattacgggcggtctggcttatccactgctgaaaatatggatgattgactggcaggcaaaaaatacgtatttgctgggcgatttggatgaccttcctttaatcaataaagaagaacaaccagataaaggcttcttagccagtatttcacggggaattatgccttctttaccatttctgtaagagataaaaaggccggagcatgctccggccttcgttttcatcactgtgttttgattacagcgcggcgataacagcctgctgttcaatcagcttcgctttcgcttccgcatagccttccagcttctcacgctctttcgcgatgaccgcttccggtgcgcgggcgacaaagccttcattcgccagcttgttctcgatacggctgatttcgccttcgatcttcgccacttctttcgccagacgcgccagctcatcttctttgttgatgaggccagccatcgggatcagcagctctgcgccgtcgatgatcttcgtaacggaaaccggacctttgtcatcggcaggcagcacggtgatgctttccagacgcgccagggtttgcaggaagccacggttttcatttacgcgacgttctgcatccgcgctgcaaccacgcagcagcagctccagcggtttgcccggcgcgatgttcatttctgcacggatgttacgtaccgcaacgatcgcctgtttcagccattcggtgtcggccagtgcggcttcatcaacctgagatgcatcgtactgcgggaacggctgcagcatgatggtgtcggcagtgataccgcaaagtactttcacacgctgccagatggtttcggtgatgaacggaatgatcggatgcgcgaggcgcagcagaccttccagtacagtcaccagcgtatggcgagtaccgcgcagttctgcttcggtgccaccgttcattaccggcttggtcagctcgagataccagtcacagaactggttccaggtaaactcatacagaatgcctgcggcgatatcgaagcggaagctgtccagcgcttcgcggtacgctttgatggtctggttgaactccgccagaatccagcggtccgccagcgacagcgtcatttcgccgccgttgaagccgcaatcctgaccttccgtgttcatcagcacaaagcggctggcgttccacagcttgttacagaagttacggtagccttccagacgcttcatatcccagttgatgtcacgaccggtagacgccagtgccgccagggtgaagcgcagggcatcggtgccgtgcggctcaataccgttcgggaactgcttctcggtgcgcttacggattttgtccgccagctgcggctgcatcatattgccggtacgtttttccagcagttctggcagcgaaataccgtcaaccatatccagcgggtcgataacgttacccttggatttggacatcttctggccttcgtcgtcacgaatcagaccggtcatgtaaacggtgtggaacggcacctgcggtttgccattttcatctttgatgaagtgcatggtcatcatgatcatgcgggcaatccagaagaagatgatgtcgaaaccagataccatcacgctggttgggtggaactggcgcagtgcgtcggtgttttccggccagcctagggtagagaaggtccacagcgcagaagagaaccaggtgtcgagaacgtcttcgtcctgacgcagggcaacgtcggcaccgaggttattttccttgcgcacttcttcttcgttgcggccaacataaacgttacccgcttcgtcgtaccatgccgggatacggtgaccccaccacagctgacgagagatacaccagtcctgaatatcgcgcatccaggagaagtacatgttttcgtactgcttcggtacgaactgaatgtcgccgttctcaaccgcttcaactgccggcttcgccagtacatcggcacgtacgtaccactggtcggtcagcattggttcgataactacgccgccacggtcgccgtaaggaacggtcaggtcgtgcggtttaatttcttccagcaggccgagtgcgtcaaccgcagcaacgaccgctttacgtgcagcaaaacgctcgagtttctggaactctgccgggatttcgctggaataaacgtcagattcgttacctttggtatcgaacacctgggcgctttcacggatatcgccgtcaaaggtcaggatgttgatcatcggcagcgcgtgacgtttacccacttcatagtcgttaaagtcgtgcgccggagtgattttcacgcagccggtgcctttttccatgtcggcgtgttcgtcgccaacgatcggaatacgacggttaaccagcggcagaatgacatatttgccaatcagatctttgtaacgcggatcttccgggttaacggctacgccagtatcgcccagcagggtttccggacgggtagtcgcgaccaccagataatctttaccgtctgcggttttcgcaccgtcagccagcggatagcggatgtgccacatcgaacctttcgattcgcggttttccacttccaggtcagagatagcggtgcgcagtttcgggtcccagtttaccaggcgtttgccacggtaaatcaggtcttctttatatagacgaacgaaaacttctttcaccgcattggacaggccttcgtccatcgtgaagcgttcacgttcccagtcgacggagttgccgagacggcgcatctgacgggtaatcgtgccgccggattccgctttccattcccagattttgtcgatgaaagcttcgcggccgtagtcgtgacgggttttaccttcttctgcggcaatcttgcgctcaacgaccatctgggtagcgatcccggcgtggtcagtaccgacctgccacagggtgtttttgccctgcatgcgctgatagcggatcatggtatccatgatggtttgctggaaggcgtgacccatatgcaaactgccggtgacgttcggcggcgggatcatgatgcagaaactttcctggctttcatcgccattaggcttaaagtagccctgcttttcccagtgctcgtaaagcggctgttcgatatcttgtgggttatatgtcttttccattatttccaggttgccgtattcaggttgaaaccagccacgcggtaggctttatagcgttcgcgcgccagttgtttcagagaatcttcataaggaacgaagtctaccacttctgtgaaagcggtggcaaaatctgcaaagcttgttcgcagactaatcaatatatcgcgcgggctgctgctgcgtttttgcggccaggcgatctccaccggcgcaccgccgcgcggtccttctcccgctaaattatgcggaacaaagctttctgccggacgcgcccacagggcttcatccagccggtaagcctgcttttcatcttcacaggcgatgagcacgcgcttaccgctgcgccaacgttctgcggcaatttcacacaccagttgctcaacggcgcttaagccatcgacggtggtgtcattgtccagaaggtagaacgtcgcgtttttcatatatggggcttcttgtggtggatttaaatacgcatcaggtatacaccgcagcgcctgatgcgacgctgttgtgtcttatcaggcctacgagttcagtgctgtgtgtaggtcggataaggcgctcacgccgcatccgacaataacagcattgcctgatgcgacgctgccgcgtcttatcaggcctacgagttcggtgctgtgtaggtcggataaggcgttcatgccgcatccgacaataacagcattgcctgatgcgacgcttgcgcgtcttatcaggcctacgagttcagtgctgtgtaggtcggataaggcgttcacgccgcatccggcaataacagccttgcctgacgcaattactcttcgccgttaaacccagcgcggttcaacaggaactgtgccagcaacgctaccggacgaccggttgcgccttttgctttaccagaacgccaggcggttcctgcaatatccaggtgcgcccagttgtacttacgggtaaagcgtgacaggaagcaacctgcggtaatcgccccaccaggacgaccgccaatgttcgccatatcggcaaaattggactccagttgttcctgatactcgtcacccagcggtaagcgccatgcgcggtcaccggattgttcagacgcggcaatcagttcatgggccagcggattatggttcgccatcagaccggtaatgtgatgacccagcgcgatcacgcaggcaccggtcagcgtcgccacgtcaatcaccgcttccggctcaaaacgctcaacgtaagttaacacgtcgcacagtaccaggcggccttcagcgtcggtattcagcacttcaacggtttgaccggacatggtggttaacacatcgcccggacgataggctcgtccgccaggcatgttttcgcagcctgccaacacgccgataacgttaatcggcagttgtagctccgcgaccatccgcatcacgccgtaaaccgctgccgcaccgcacatatcgtacttcatctcatccatgccttctgaaggcttgatcgagataccgccggagtcgaaggttaaacctttacccaccagcacgattgggcgtgcatcttccgacgcgttgcctttgtactcaatcaccgacatcagcgattcgttttgcgaaccctgaccgaccgccagataggaatgcatccccagctctttcatctgctgttcgccgataacgcgggtgataacattcttgctgtagctgtcagccagctggcgcgcttgtgaagcgaggtaagcggcgttacagatattcggcggcatattaccgagatctttcgcggctttaatcccggcggcaatcgccagaccgtgctggatcgcgcgctcaccgctggtcagttcacggcgggtcggcacgttgaacaccatcttacgcagcggacgacgcggttcgctcttgttcgttttcagctgatcgaaactgtagagcgtctcttttgccgtctcgacagcctgacgcactttccagtagttgttacggcctttaacgtgcagttcagtcagaaagcagaccgcttccattgagccagtatcattcagcgtattaatggttttctgaataacctgcttgtactgacgctcatccagctcacgttctttgccgcaaccaataaggagaattcgctcggaaagtacattcggaacatggtgcagcaacaatgtctgccccggttttccttccagttcgccccgacgtagtagggcgctgatgtacccatcgctgattttatcgagctgttctgcaatcggagaaaggcgacgtggttcgaagacgcccacgacgatgcaggcactccgctgtttctccgggctaccgctttttacactaaactccatgcactacgctcctgaatcttaaanacaacggcggtggctacagatagaattgcaagctttcgtaactcatgtccgctgttgcgatgacttcgtgttaatcttaacgttattacggcattggcacgtcagaacaaaatctgagaggtgaatccgttgagtataattatcttagcgacgatttcgacgactcaagagaataaatgacgtttaagccatgaaacaagctaaaatcctgcaaaagacgagtttttacgggcgtatttaaagtgataatcataagatatctggtgcgggagacgctcaaaagccagctggcgatactcttcatcttgcttttgatcttcttctgtcaaaagttagtgaggatcctcggcgcagcggttgacggcgatattccggcgaatctggtgctctcccttctcgggttgggcgtgccggaaatggcgcagcttatcctgccattaagcctgttcctcgggctgctgatgacgctgggcaaactgtataccgaaagtgaaattacggtaatgcatgcctgcggcctgagcaaagcggttctggtgaaagcggcaatgatccttgcggtattcacggcaatcgtcgcggcggttaacgtgatgtgggcgggaccgtggtcatcgcgtcatcaggatgaagtgttagcagaagcgaaagcgaaccctagcatggcggcgctggcgcaagggcaattccagcaagcgactaatggcagttcggtgctgttcatcgaaagcgttgacggcagcgatttcaaagatgtgttcctcgcgcaaattcgaccaaaaggtaatgcacgtccttctgtggtggtggccgattccggacatttaacccagctgcgcgacggctcccaggtcgtcactctcaaccagggaacgcgcttcgaaggcactgcactgttacgtgatttccgcattacggatttccaggattatcaggcgatcattggtcaccaggcggtggcgctcgacccgaacgataccgaccagatggacatgcgcacattgtggaacactgacaccgatcgtgctcgcgcagaactgaactggcgtatcacgttggtattcaccgtgtttatgatggcacttatggtcgtaccgctgagcgtggttaacccacgtcagggacgcgtactgtcgatgctgccagccatgctgctgtatctacttttcttcctgatccagacctccctgaaatcgaacggcggtaaaggtaagctggacccgacgctgtggatgtggaccgttaacctgatttatctggctttggcgattgttctcaacctttgggacaccgtgccggtccgccgcctgcgcgccagtttttcgcgtaaaggagcggtgtgatgcaaccttttggcgtacttgaccgctatatcggtaaaactattttcaccaccatcatgatgacgctgttcatgctggtgtcgctgtcgggcattatcaagtttgtcgatcagttgaaaaaagccgggcaggggagttacgacgcgttaggcgcaggaatgtataccttgctgagcgtgccgaaagatgtgcaaatattcttcccgatggcggctctgcttggggcgttgcttggtcttgggatgctggcgcagcgcagcgaantggtggtgatgcaggcttctggttttacccgtatgcaggtggcgctgtcggtgatgaaaaccgccattccgctggtcttgctgacgatggcgattggcgaatgggtcgcgccgcagggcgagcagatggcgcgtaactaccgtgcgcaggcgatgtacggcggctcgttgctctctacccagcaaggcttatgggcgaaagatggcaacaacttcgtctacattgagcgggttaaaggtgacgaagagttaggtggcatcagcatttatgcctttaacgagaatcgtcgtctgcaatccgtacgctatgccgctactgcgaagtttgacccggaacataaagtctggcgtttgtcgcaggttgatgaatctgatctgaccaatccgaaacagattaccggttcgcagacggtgagcggcacctggaaaaccaacctcacgccggacaaactgggcgtggtggcgctggacccggatgcactctctatcagcggtttgcacaactatgtgaagtatctgaagtcgagcggtcaggatgccggacgttatcagctcaacatgtggagcaaaatcttccagccgctatccgtggcggtgatgatgctgatggcgctgtcgttcatctttggcccactgcgtagcgtaccgatgggcgtgcgtgtggtcaccggtatcagtttcggttttgtcttctacgtactggaccagatcttcggcccgctgacgttggtttatggcatcccgccgatcatcggcgcactgttgccaagcgccagcttcttcttaatcagcctgtggctgttaatgagaaaatcgtaaccgaatgaacgaataaagggagcgaaagctccctttattattgttagcaaagtgtgcttcgttcattcctgaaaaataattaaaattcaatatattgcagtggggtgggcatgataagacgcgccagcgtcgcatcaggcaaagacaaatctcgcctgacttaccttcttctcccccccagcaaactccccaacatcccgcgtacaatctgattcgtcacttggcgagcggcgcttttggccattgtttgcaccacaccatctttcttcccgccgcgtggtccggtagtgccgaacaaaatatccttcaatccaccaagaatgccgtcatccaccgctacctctttccctttcgcggggggattattttgctgctcggtactggcctgaaagcctttttgcaacatctcataggcggattcccggtccacctcatcctcatatttgccatacaccggagagtgattaatcaagccattacgctcatcttccgtcaccggccccatccgcgaacaaggcgcgatcaccatcgcacgctccaccacagaagggcttcctttcgcatccagaaaagagatcaacgcctcgccggtgcccagttcctgaatcgccttttcggtatcaaacgccggattggcccgcatggtttgcgccgcagcttttactgctttctgatctttgggcgtaaaagcccgcaaagcgtgctgaacgcgattaccgagctggccgagcacattatccggaatatcagacgggttttgcgaaacgaaccagacgcccacgccttttgagcgaataagccttatcacctgctcaatcttatccagcagtacctgcggtgcatcgttaaacagcagatgtgcttcgtcgaagaaaaacaccagttttggtttctccagatcgcccgcttccggcaattgttcatacaactctgagagcatccacagcaggctggcggcgtacagtttcggcatctgataaagtttctcggcgctgaggatattgataacgcctttaccgttggcatcggtgngcatccagtctttgatatccagcatcggctcaccaaagaagtgtgctgcgccttgctgttccagcgacaacagcccgcgctggatggcaccaaccgatgcgctactgatatttccgtactgattctggaaagatttggcgttatcgccgatgtactgggtaatcgcccgcagatctttaaagtcgagcagtaacagcccctgatcgtcagcaatgcggaagatgatattcagcacgccagattgcacatcgttgagattcaacagccgcgccagcaacagtggccccaggtctgaaaccgtcgcccgtaccgaatggcctttctcgccaaagatatcccacaccaccaccggattagcatgcggttgccagtcattgacgtcgatatttttaagccttgcgagcagtttttccgacgccgttcctgcctgcgcgataccggtcagatcgcctttcacatcagccataaacaccggcacgccgatttccgacaatgactccgccagtttttgcagcgtgacagttttacccgtccccgttgcgccagtaatcagcccgtgacggttagccattcccggcagtaaaaatagttctgtgtccggcgtgcgggcaattaacaggggttcgctcatgagatatcctccagtttcctgcctggagtataggcaacggctgcgcactcttcaccgctaaattcagcagattgcgagacgccttccaaagagatttaagtgccgggcgacaggcacccggcaaagagatcagaagtcagctttcagaaccacgcggtaacgcgccttaccgtcgcgcacatgcttgatggcatcgttaattttcgacatcgggaacaattcggtagtcggcgcaaccttgctgcgggcggcaaagcgcatcagcttacgcaactcataaggtgtaccggtagcagagccagagacactgcgatcgcccgcaatcagcgtaaaggccggaaccggcaacggcgtgagaaccgcaccgaccgtatggaaattaccgccataggtcagcgcctcaaaataaggctgccagtcgaggctgacgttcacagtattgataatgagatcaaactgccccgacagggctttcagtgcctgcggatcgcggctattcaccactttatcggcacccatcgccagtacttcctgctctttcgccggattagaactaaaggccgtcacctcgcatcccattgcgtgcagaagttttatagcgatatgccccagcccgccaataccaattaccccaacgcggctggtagcagtgatatggtgcatcaacagtggtttaaagaccgtgataccgccgcacaacagcggcccggcggactcgatatcaatattttctggcagtggaatcacccattgccagtccgcacgcaacttctcggcaaagccaccgcgattcataatcgtcggcacagcactttgctcgcagttgatctgattaccgctaatacaggcgtcgcagtgaccacagctacgcgccgtccagccaatcccgacacgctggccgacctgcaaacctttatcctgcgcggcnntcccgagcgccgccacgcgcccaatcacctcatgcccggcaaccagcggatattgtgaaaatccccattcattgtcgatcatcgatagatcggaatggcagatcccgcaataatccacctgcacttcaacatcttgtggcctcagctcaccgggatcgtactcataaacttccagttcgccgcccgcttcttttgcggcatagctttttatcatcgacattttttggtccttctctggtgttgtttgggaagtgtagagcatggcagggcggggtgcctggagtgtgacaaaggttacacatcgctgtatgcaatgctgaaaatttcagcacttagcgaggtgcgagcaagctggcgcttgcatggtggcgtgcgacaggtataatccacaacgttttccgcatacctcttcagtgccgaagtggcgaaatcggtagacgcagttgattcaaaatcaaccgtagaaatacgtgccggttcgagtccggccttcggcaccatacaaagcttttttcaagtctactaacgtctactttagtccataaaaacagtaatttaagcaggtttctggcttttcttagtctgttcacgtctactcagttccttgaacatataccaaccgatgatggtataactgatggtattnccgrttcgatattgcttgtatactcacgagataccaatggaaggaagaccattatggccctaacggatactaaagttcgctctgcgaaacctgaggagaaagagtattcacttgttgacggcgacggcatgtccttacttgtaaaacctggcggttcaaagtattggcgatttcgtttccgttttggcggtaaacaacatttgatggcgttcggcgtttacccggatgtttcactggcggatgcgcggaagaaaagggaagaggccagaaagctggtagctgctggtatcgatcctcgtgagcataagcgtgctgtgaaagaagagcaggcgaaagagattattactttcgagaaggttgccagagagtggctcgtaaccaaccaaaaatggtcggaagatcatgctaatcgtgtaaaaaagagcctggaggacaatatcttcccggcaattggtactcgcaacattgctgaactaggcacccgcgatctgttaattcctattaaagccgtggagaaatccgggcgtcttgaagtggcttcccgccttcaacagcgcaccacggccatcatgcgttatgcagtgcaaagcgggttaattgattacgatccggcgcaagagatgtcgggggcggttgcttccagtaatcgacagcatcgtccggcgctggagttaaagcgtatccctgagttgcttgacaaaatagacagctacaccggcagaccgctaacccactgtacgacagaactcactctgcttatctttattcggtccagtaagctgcattttgctcgctggtcagaaatcgattttgaaacgtcaatgtggaccatccctcttgattggtattgcagtaagcagagggttggactggtacagtaaatatcccgcataatcgtgccattcacatttagagatcctccggcataatcaatctgccaatgaaggagatcgctattcgtaaagccccttttactgagcatcagattatcgccgtgattaaatcgcttgaatacgggcgaactgttaaagatgtggcttatctgaagccacttactacaactgcaagtccagatacggcggtatggaattttctgatattaaaataatcaaggatcttgaggatgagaaccaacgtttcaaatagatgtttgctgatctcattatttggtcgggatttttaaagatgtatggaactaaaacgggtctattttcagagggatttaactgaagcagaaattaat

SEQ ID NO: 1683 - DNA, 7733 bp, Escherichia coli
  Strain O55:H7
  modified_base (32)..(34): a, c, g or t
  modified_base (36)..(36): a, c, g or t
  modified_base (369)..(369): a, c, g or t
  modified_base (427)..(427): a, c, g or t
  modified_base (1052)..(1052): a, c, g or t
  modified_base (4303)..(4303): a, c, g or t
tttataggtggctggtatttaatattcctgcnnnanatctctgatgcaggagcagagaatggctataaattattagtaaacagaatgtctatctctcacccacaaacccctcataagggtaatttttacgcacctgcggcaacgcaatagttttcccgtcaaaatcccagaataatctctcaacgatccctccgccgtttaccgcatccgagaccagtacccgcatattttcatccaggccaatcgatcctttatcaaaggctttatggtgtattgcgcaaagcgccagaccattggggatttcacaagggccgccgtgctgtttccattttatatgcgccgcttccagcgcgacggtggtgtcatcgnggcgcatattaaagccacatattgcgcactggtagttataagcgcgtaatacattttngcgaaataacgggtcgcgctgtttacggatttgctggagatcaaaacccagctcgtcagcgatttcttcctgaatactctcggtgaagtgcgcttcgagtatctgttgcgccagagtattgatgagttttttattgccggttaccagggcgtagtgctgttcatcgaaaccgcctgcaacgtggtattcgttcagttccttcactggcggttgtcggctgctccctgctgttgagcaacgctcggcattgtgtaattgccagattccgtcgccttgtaatcgccagaacggcatatcaggtcggtactgtgaacgctgtggcccaaaacgttccagtaaactgtgcagaggttcgtagatttccgtgccataatcgaaaaggcgcggatgtccattcaggtatcccgctaatacgtatagcagtaacaatggtttatgcggcgcgcgctgtttacccttgtgccagatttttatgttggcaattgcctgctgtagcgatttactggaagccattgatatcccaggcagtgaaataattgcaatcatgctcgcaaattttctgctgttcaagcctgcaagtgaagatccattgctgtgttgagggatcaaaagacaacaaaaactnattgaagaaataatcttctgcttttttgtcgaaataatgggcattgatcttgtctatagctgctgaatcttttccagcctcgttgagatcttcaaaatagccattgaagatgttctggttaacaccgccagtaacataagccttgccgttgtgtacaaaagtcacattacccgccatgcccatcggcgcgtgcgacatcaatttattgctttattcattgtgactgtcttctgtctaccaagctttaaccttcacccatatgagggaagttttaagtatgaggcgaaccatagcatatgcttttatacctgttacaccataaaaatcagacaagttatgccataaactacttttgtaatttgagccacaaatcagggaaattttatttatcttccgtgaaagtcttaactttcacggagttttagaatttacaattttgctggcgtaaaggctcctgtttgtatttctttaaccagctcacccacggtatatattctccatccttcgacttcggcgggagtaaggttaactgcaattttaaggcctggccatgcagcttctacggttgcaataatttcatgttctgagttttgaagatctaacccaggaacaggaggttgaaagcctttatgttgcatcatattaatatcaccatgcactgatggatcagtcaggtcatatatttcattccaggattctgcttttaataacccttgttgggaacgtaaacgttgaatgatagccatctctgcttgggtaacgaatataccttcgtggaggggctgttttcgatggcaatccttgcacagaacaagaaggttttcatggtgattatcatatttgatgccatttttatgatggacatggcacaagtttttggcggttgataaattcacgccacaatcattacaaacataatttgccttttctcgtatttctttagatatttccttccagttttcgacatacccactatttgttttgtcatagatacccttaggcatatgacgaaaacaggtactataatctgaaaaaaactcatttaatgagaatgatttaaaaatctctctttttcgttgtttatcaatacttcctttataattaagtcgttcgaggcaattcatacatacccgtaaatcaacatcctggctccgacctgaaccatcatcaatttcgaataaaccatctatgcggttagttgcatgatacctttcaaatcgatttttatggcgcatttcatcaagagttctgcaccaggcaatatgaaaacgttttcctttttcgccatctacgatagccgcatcataacgccctgaatggtcccgaatatataaaagaacctggcggccatgataagagataagcccgctaccagggtcaagatcttcgatactaacttctttacccgtggataactcaatatctataggatcaaagtcaataggggattcatccagaaaaaaatcgactccttctggtaacattttcttccctaattgaataagttctgaaatgtcgatagataatttcatctcttactcctgaataatctttctaatctgcaactcggcatttgttacaactttgaaggtgacacgacgagagcgattaggatcctccttgccggttttatcaagaatgggatgtgcagatgaataacctactgcggcaaatttacttttaacccattgttggtgtgtcgcgatattttttatgtcataaacgtattgtaatactgcacgtgtacgaccttgcgatagtgccatattattaaaataagcaatatcaggattcgttgttcctgtccagtcagtacttgtgtgaccttcaatgcggacttcagtaatatgttcctgataattatctagaacttttaggtagcgaggaaagaagtcgtcaagaatgagtttaaactttggttttagctctgtgcttcctaagccaaataaaacatccggtgatttaaatcgaacctccagagtctgtttatcgatctctgcatcccagtcttgtaaatcctttgcaaactcaatatccagagcattataaagctgtaactgagcattctcgtaggctacggcaacttctttaattttttctttttcaatacgtacgtagtgcatataagcaatagatatgaacataaaaaccatcatcagccctgccattaggtccgacatggatacccaatgttcattatcttgatcttttttaggtaattgtttccctataatcttatccatgatcgattacccgcgatgtttattagcagaaattaatgcttgtaactgccccataactatttggtaatctttaataagtttttcatagttaccgacaaaacctttgctgattgaaagcagagcattacctaatgattgcatttcacggttcatttcacgttcagttgcttgctcaaaagcatgtaactgctcgttgatggatagagcaaatttttcaattgattctctgacttgagaagtcagccctgcacttgccttatcaaatgatgtctggattgaatcaaacatattatcggcattactggatagttgatggttaatcttttcaccagtcttactgaacatatcaatcacattcgtcgtattttgttccatatttctatgcaattctttcgagtgcgactctagtgatttcaggaattcttcaccactttgtttcatttcagtaattgtttcacctaacgtgctggttagggtttcggaggaattgctgacatcatgtgccatcgaggcaaatgcttgttgtgtttgggtaaccgattgtctgaatccttcggtaccttcatccagggcaacgcgcattgaatctgcattaagaagtatttgctggctggtttgctcaagagatgcactaacatttgcagctccggatttcagcagttcacccacttcagccattttgttctgtatttcaggtaatacggttgtagctttatcgcggatggcgacaaaggtttctaaatggcgggagagttcgctgatttgatgttggttcacctgaagcacttcacgcagttcagacatagccagaggaatttctttacattcttcccaaatccctgcaaccgcagtttttgtttcaaccagggactcgacactttgttgatattgttctgacatctgctcaatttgcgttttataatttccctgccactcaacaagtttttttacagaggcatcaagagctttaaagttttcaccaaactgttcagttaaattttgattaanatcaataatgacttgtcgcaaagcatcaataatttgttctgtagcaccttttgccattagatctgcaaattgttcaagttgttcccaaagcttattactgaaatgagtgtgattagctaattgtgcctgcgaggaatcgctaatctcagtacgtagtaattttatttgagcaataagagaaccttcactatcaccgttaatacccgagactaatttagtcagagtctggttctgctcttttaattcatgatagatatgttcaggtgtaacagattcagggttattttctgctaacgcacttcgtttattggcaaaaaagaaagcatccattccattaaataaaatggcaaaaaacatacctacaatgcttgtaatgaatgctgtttttaggccacctaataatacggggatgctggtatcaatactttcggtattaaaattgagtaaaccaataataataccaatgaaagtacccagaatacctaatgcccccattaaggttggagcatattctctaaacttactatgtatattttttttgtcacaccaccacgctgataaaaatacgaatataacagcccagatgaaaatattggtgatcagtgtagagtctatcgattgaaacaactgctcaaaaagctgcgctaacattttgatacctgtgtaaataatggatagttgtaatcgtttaaaaaataaacaaaacacacataatttatatggttaagctcggtgtagcgctcatgattgtaacaagttttttcgagatataaatgatttgtctcatttttagcgagttcatcgggttgagcttttttatgatgatagtaacctgttacgaattgtatcaaaggaaggcaggttgcttgtgaaaactccagttaacccacttttgcaatggcttaacatgttttttagtcgccgttcattatccggagctgatggacgggcgttatatgcttaccgttgtactgatacagagtacgaaagtttggcagaactactgcgtacatatgccccccgtagttatccaagaacgatattcatttcctatagcgatgttctatttagcatatatgccgcagagtttatccgccggactcatacggtcggacaccctaaatgggacacaattttagattctattaactggaaagttccgtatgttcatcgacagaagctggttaatgatggcattcgctactggaaaagaaagataagaaacctgggacaagcttcgggttatctgcatacactggcttgtgaaggtggtttgcctatccgcatgattgaaaatgagagcggttatttgattacctatttcagaaggatatatcaggcgcttcgtgggcaatcatctcaatatcctgccgctaaaattgcacaagaattaggcgatacgattcctgtcacaatgcaaaacgaactggtctatgaaatagccggtgaattctgcgagactctctgccgattacttagtgagcatcctcctcatagcagtgatcccgtttctgcattacgtaagctctctccagactggcatcttcaacttccactcgttctccccgaagcgaatgctgcagagattgtaaggcgattactttctcaatcttctgaaatacgcagtgcaagtagtcttcaggttgaaagaatctgggtcgatgttgatgacagttggtattgcgatgcccgtttccgattcccggccacaatgcgtacagaacagttaacctctttgtttgaatgccatattcagccggagcagacccgactcatcatttcaggaaaatggaaaaatggcggggcaaggttggcaatgctaagccgttatgagcagcaagattggcgggtcgagttattacctattgcgatgcaaaaactctctggtgcagatgcaatggccgaaatctcattgtcgcttcatgaaggtccaattctgttaggtcacacaattccaaaaggcggttatgaacttactgaagaacttccctgggtttttgaagcgatgaatgagagtgaatcgcagctaaaacttgttggtatggggtctgtgagttccaggctaaatgctctgtttatttcgctaccgaaaaatagccatttagatattagtggagaaggtgagtttgatatcccaaggttgctgaaaaacagtgaacgcagcttaactaaaataagtggagtatttagcgttgttttacatgatggtgctgtttgtacaattcgcacccagcaactttatgattctgcgattgaatattatattaaatcgacagaagttgaactggttaaatcggattatcctctccatcgagcctggccgaagatcggttggaaaaaggatctgcaatatggcattgtaccggagaaagaacttttttggcgttccattcgttcaggtaataatgcctggtattctgtcgcatcagaaatgccaaaaggacagatagaagtccggcgaatagttaatgatgaggttttatttagcggtaaagttgtagttttaccagcagacttcgatattaatattatacctgagagtgctcagcaaggcattattatgctttctggtataacggatactagaattgataaatattcaaacaatgaaaaagtaacacttaagtccgattattcacaaaacgagtgtgctatttattataattcatcgctgatgctggaaaataccgttgatttacgggtctcctggaaagatggttctaatcttaaactattattacctaagccggttagcggtggccgatttgtaactaatgatggttctgttcattttgatggtgtggcatctatagcacatttgcatggaatagatgctgagttattaaccatatcatgtgctggaagaggatatcttaatatcgagttattggatgaaaatccagtagctgaaaaattccgctatttacatgccgaccttcctcttttatcaggacgcaatgacaaattacaacaaatttcactttatgagaactataatttgctaaatgctatgctggcatgtgcatggaacagcaatagtacattatgtgttgatttttactctgacagatttggaaaggataaagcaacactcaatattaaacgctacgatggtagttttattgaacacgatcaagggttactggttgatataaaaaattctgttgtttttcctgcaaatagaatagacgaactggttgttgatgctatttctcttaagaatcctggcttacacatatcattgttaaaaaaagatgagtttgcttatgatctttcagctctgaatgttcaggatagtccatggttaattgtgggaaaacttgatggtacagctcgcattgcaccagtaattaaatggatgctacctgtattgcagacaaatgatttattactaaatgctctatgcgaagcagacccagaacagcgcaaa

SEQ ID NO: 1684 - DNA, 31174 bp, Escherichia coli
  Strain O55:H7
  modified_base (7184)..(7185): a, c, g or t
  modified_base (9425)..(9425): a, c, g or t
  modified_base (10323)..(10323): a, c, g or t
  modified_base (22574)..(22574): a, c, g or t
  modified_base (22881)..(22881): a, c, g or t
  modified_base (23061)..(23061): a, c, g or t
  modified_base (23163)..(23163): a, c, g or t
  modified_base (23242)..(23242): a, c, g or t
  modified_base (23470)..(23470): a, c, g or t
  modified_base (24099)..(24102): a, c, g or t
  modified_base (25156)..(25156): a, c, g or t
  modified_base (28757)..(28757): a, c, g or t
  modified_base (29228)..(29228): a, c, g or t
  modified_base (29235)..(29236): a, c, g or t
  modified_base (30135)..(30135): a, c, g or t
  modified_base (30158)..(30158): a, c, g or t
  modified_base (30191)..(30191): a, c, g or t
  modified_base (30207)..(30207): a, c, g or t
ttaatgagctaatttttgaaatagataacaacccattgcaaaattattgctgtttattaacagagtatattaagaaatacaaaatgaataatggcttatccttgctggatctggacttgttcagaggtatttcgagtaattaccgcgtggttgttcaattgttaatatcatcatgtctttctggtgatagcgatacgatttatgatatacaggaagaattacccttttcatggggatggattcccgtttcaatctggaaagatgttttccaaaaatgttggacttatctggagaaacagattaacgataaaacattagcattacatatattgcaaccctttattgcttttatgaaccatcgtgcacatatcgatcgtcggctggctccgattgcgaatatgttacttacatatagtgagagcctaccaaccggttgtgatgtattgccaactgttagtcgtgagcagtttaatgaagctaaacagatgctattaaggaaccccgacagctttgggcgtatcagtatcttccctaaagaactttggtctagtgctattactccagagttaaaatctgtttttaataagctttggattgaagataaatatcactcacggcttgaaaaacgttttaatttgatgttagtcgcagcgctgttaacccaaaaagataataacctgatacatcaactgtctgcgctttttgaatttcactatcagcaagccccacagcaattaggggtaatctatcaatattattttgaacaagcaggagtatgtcattgatggacgttcagcaactgcattatgcgccacttctaaatcagcttcatcagcgtgcggtgaggtcggtggtaagtcagttggcattgcggagcaagtcgttgactcattatctggaatcacaatattttcagcctcccggtcaggaggggtcactgcttgcagacccggtattcgaaagtacattcggctggatgcctgcggatgaaacaatggaggatttgcgggacaagctgatctccagcccgctggttgatgcattgagcaaagcgccagtgccatttcgtcatcaacttactgcgtggcgaacgattctggaagacaaaaaatccttgttagtgagcagcggtacgggatccgggaaaacagaatgctttatggtaccggttctggaagatcttattcgtcagcaaaaatcgacccgccagtcactaacagggacacaagctattttcttgtatccgttaaatgcattaattaacagccaacaggagcggcttcgcgaatggacgcgcggatttaaggggaaaatacgcttcgcgctatataatggcgaaacccggcataccaaatacgaaattcaggaagatcagttgaaagtacctgaacaagctttgagtcgggaagccatttatgaagcaccaccttccatcatggtgacgaataccaccatgctggaatatatgctgattcgtcgtaaagatgccccaatcatcgaaaagtctcaggggatgttaaagtatatcgtcctggatgaagcccatagttatattggttctcaggctgctgagttagcgctgcttttacgtcgtgttatgcaggctttcaatgttggacccggcacagataaacctgtgcagattatcgcgacctctgccactattggtgaagactctcctgaaggtaataaggagcttgctaaatttgtcgctgatctcgcgggcgttacagaacgtgatgtcaaagtggttcgcggttatcgacaaataccgcgggtatcggagtcgctgattcgtcatgaataccccacatctttaacttctcttaaatccctgagccctcaggatctttaccaacagctttgtcattaccgtgtggcccagcaattgcgtcaggcgttaactcatcccggacggcaggcagtacgtttgagtgagttgctcaatgttgccagaagaacctggccagatattaatcaccgtgagctactgcaactcctcgatctaatggcaagatcgcgagaaggtgaactggcttttacgccattacgtatgcatgggtttatcagaacactggcgggtctatgggcatgttcaaacaaacaatgctcacataaagcacatgaattaaatcagagtgactggccatttggtcaggtatggtttgagcagcgccaatattgtgactgtggagcgccggtatttgaagttttacgttgctccgggtgtggttcagcttatttgtctgccaaagaggagatgcgcggtgatggaacgaactggttggtagcgcaaccagccgctgccgaagtggatgagtttgctcttgatgtagatgtttattctgaagatgaagacaacgacgaattagacaataactctcaatttgatcgtctgattgcgagcggtggtgaaaaatatatcatttcactggaagaaacgacggcggggaaaattgatagtgaagcgcaaaagcactatgaaataaacctgttaagaccggaatctcgaggtgagggacgcaataactcctttgcttgtgtttgctgtggtgacactcaacggaaaaataatcctttattccgtccgcttcggctcggcgcgcccttttttttaaatgaaattattcctactctgctggagttttctccattaccgcaaacaagagaagagcagttaggaccgtttaatggtcgacgcttgctcacctttacggattcgcgtcagggtaccgctcgcatttcagcccgcttacagcaggatgccgataaagcgacgttgcgagctctttgttaccaggagctggcaaatattacagagccttcagcaaaactcagcccggcacactgtgcactgttagagaaagttattagccagttttctgtcctccctttaaaaaattccatcgacgcgctgaaaaaagcgatggctgcgaatgaggagcttagcccgacggacattcaggcacttaaaattattgagccgatggtgagttccttaagcacggagcatgctgaagcgatgcaaatacttcaggctaactctggcaatcagcagaagaaaaccatgtcatggcaaacgctgtctgaacagctggttggcagtgtggaccttgccgatagaatgagaggcagttttaaagaattgtctgggcttgatcttactaaacaacagtttgcagatttttgtttatacagcgagtttggtcgccgccctaaaaatgcctggaccctcgaaagtctgggtctggtagccattcactatccattcattgataaagttacaacctgcccgcaggactggaagacattattacccgatcccgataagcaattagcggaatggcgtaatttattgaagattactcttgatttctttatccgtgaaaacagtgccgttttttacgaaaacgagcaataccctcgctggatgggggcacgtttcccggtaaaaatgctccaggggccagataaaaaaaacaaagggcagaaacgtgatcaactttggccacaaatacgcgatcgccattataaccgggtcattaagctattaatcgcagtctttccggcaatacaacctgagcaggctcactggaaatcgttagttaaccacttaatgattgaggtctgggatgcaattcgaccctgcttacgtcagtttgagtcgggttatcagctggatattaaacaacaagctgaattttacagtccaaagcaagtgtggcgttgcccctatactcgacgtgcgttagacgtcacgttgctgggatactctccgtatttgccgggtagcaaagaaattgcacctgaaaaagcagtgttgattgaaatgcctgagcttcctgtacgtcactggcgtttgtctggtggtggagaaatcgcccgagaagaacgtctggagtggctggaaagtaatgcgctgattcaacatgcccgcgaggaaggattatggtctactcgcagcgaccgactggccctgaaagatagctggtatcgtctggaggaacactctgcgcagagaacgcctgagcagaaccagtttaatgaaaaacaatttaagtcaggcaaagttaatgtgctgaactgttccacgaccatggagatgggggtggatattggtggtatgagtttggtggcaatgaacaacgttcctccagcgccggcaaattatttgcaacgtgcaggtcgcgcggggcgtcgtggagagagtgcatctgctgccattacgttatgtaaaaacacggcgcatggaatggaggtattcaaagaccccctctgggcgttcaacactactgccagtgcgccacgggttcgttttgggagcagtagtattgttcaacgacatgttaatgccctggttttaggtctgtttttacgagctgaagttcctgatgcgacaaaactgagttgcaaatggttctttgaaggtgatgagagccagtgtcttcgttttctccattggttaaatcaccaggccgatcagctggcggataaacttaaacgccttactcagggaaccgtactgatgtcattgacggcaacccagctcttgacccgcacacaagcaatgatgcagcaggttgatatccgctggagaagccaacttgcgatactgttggaaaatatcgaagcgttgaaggcggataacagcgcgtgggaagaaacaccagcaggtaaagccatcgcttatcagcttcgtgattatcgcggtgcatatctgttttctaaactcattagtgaagcgttcctgccggggcatggtttcccggttggcgtagtcaatttcaattatctgacggcagatgagctggaaaaacgtcgcgcaataaaagccactcaggctgaccctaatgaagggggagaaagcttttctcgtcgtattgaaaaattgcccagccgtgatttgcctacagcattacgcgagtatgcgcctggtgcagatgtggtattgggcggaaaagtatatcgttcctcgggcattatgcttggcaaggtgcttgccagcgggcaggagctgtcaggcgatcatcatattccgtggttctggcattgccgtaaatgtggtgcgggggcaaccagtactacccatcctgtcgaatgtagtcactgcaaagcggatatacagcaacttgatgtgaagcgttatttacagcctgttggttttgcgacagatattcgttatcaggcacataatgatgtatccatgcctgcacaacttccctggaaagatccacgtgttcttgtaccgtcttcggtgtgggtttctttacccgatgctgggctaggacgttaccgttttagccatagtggggaattgttccacttcagtgaaggggaatttgggcacggctacgcaatttgcctctcatgtggtcgggcagaatctcaaactcaaccccagcgtacccctgaaaatctaaagaacccagagagggaaaatacgcattacctgttgcgagggggcagtaacgatcgtcaggggagcaataaattgtgccacggtcatgtgcataaagatctgtggttgggatatagcagtcgtacagatatggttgagctgcaactcaatgatgataatggcctgttgatccgtgatgaggttgccgcgcgttcccttgcggtcgctttgcgtgaagggttagcgcataaattgggtatcgaaaatactgagctgggcgtgacgacgcagcaagcgcgcgatatcaatggctataccggatattccatcttcatttacgacaataatgcggggggtgcaggttatgcagtgcaattgatcgaccattgggctgatgtctttaattacgccagaaaattgctcgattgcagttgcgataaattctgtcaccactgcttgctcagctacgacagtcagcattatgtcaacagattagatcgtcaccatgcattaaccctgcttaccaatgtacggttgcagcgacttaacctcgcgccagaatatcagtacttcggcgatggtagccgggttgaaactaaccctctgagtttacgtattgcgcaatgcctgaacagcgagatttatgactcctgctcgctggttcttgcggggccgcaggaacagtgggactttgcccaatggccattatttaaagagttgctccagtttgcctcctccggtgggaatgttgagttgctggtggccacgccgctggcaaacttaactgatagctccagacatcagctttccgcgttggcggcgatgccgggaggtcgcttacaagtgaaatccattgccactgcgcagctcatgcaaggaaaggggcgctggcttgcgcaggtgactcgcgaagggcaaagccaacagtgggccgcagacgacagcgctaccgttgcacctggtgaattatggggacaaagtgcgtcttcaccagtagtgacacttaaaggaacgtccggaaaaaccttctcgggtcagaccttaagtgcagaagatttactgcccgccttacccaccggggcggtgcgcatcaatctctgtgaacaactggacgggccgctggaaggttttggttcgcgtttctggtcgttagtcacgcaacagcacgctggctggaagcaggcatttacccgccacaaagagataacgcatgttgagtacagcgatcgttatcttaatagcccattcacggcgcgtttgttaggtgaaatcttaaccgagctggttgaacagggaatggcggaacgcgccagcctcactgtttgcgtcaaaaaattggattacaactctcgccaacacgacgctctctataacgcgtggcttaatgaggaagatcgtcagcaggttgtgaccactttacttgaagaaggatatctggggcctgcgtggccgggagcaattagctggttaacgggggataaccagagtacggagcatggacgagaactgacagtcaccttcagcgatggcagtcagcattatgtcctgctcgacatggggcttagctactggcgctgtattgaagataccttctttgattttgccctgcgagtaccgcagcaagttgaacggctggcaaacacgcgagcgcgagctgttgccccgggtaatgaccttaggagttatattatcgctggataaataattgctcccctggggatatcttccaggggagttgacccagctcactttttaataatttttgtttgaaaatcatgcgcaattnntgcgcattccctcccattttgtcactttgccgggggccttcatgatatctttaaggccctcttttttatcgcagtgtgccgcgccacatttttcaggatgacgttaccgccactgccccaaatagacagaaaaaccgatgaataagcaaaattatgcacctggtatgcgggtggttattcgtgatgccgaatggcgtattcgccgggcggatgacagtggtgatggtgggtatttgctgacctgcgatggtatttcagagcttgtgcgcggtaaagaagggttatttctgaccaaactggaacaaaaagtagagatcctggatcccgcaaaaacgcatttggtggaagatgaatccgccaattatcaagcggcacagttgtatattgaaagtcagttacgccaacgcgtaccgacagacagtaaagtccattttggtcatctggcggcgatggattccatgccgtttcagctcgatcctacgcggatggcgctggcacaaccgcgtcagcggatactcattgccgacgctgttggtctgggtaaaacgctggaagccggtattctggtttcggaactgatccgtcgtgggcgcggaaaacgtattctggttctggcggttaaatcgatgctgacacaattccagaaggagttctggagccgttttgcgatcccattgacccgcctggattctgctggtttacaaaaggtgcgtaaccgcatcccaaccaaccacaacccgttccactattttgacaagaccattatctccatcgatacgctgaaacaagacattgaatatcgtcaccatctggaaaatgcctggtgggatattattgtcattgatgaggcccataacgtcgcagaacgtggaaccagttcgttacgcagtaaactggcaaaactgctcgccgggcgcagcgatacgctgattatgctttcagcaacaccgcatgatggtaaggctgaaagttttgccagcctgatgaacatgcttgacccgacggcgatcgccaacccgaaagagtatgaatacgccgattttgccgataaaaatctggttgtccgtcgcttcaaaaaagacgtgaaagatcagatgtccggcgagttccccgagcgcaatattgtcaaattgactcgcctggcatccggtgccgaagaagaagcataccgtcgtctggttgagagccagttccgtgatgatgacgatgaacaggcccagtctaacaaaggtcgtctgttcaagataaccctcgaaaaagcgctattttccagcccgatggcgtgtgccagcgtcgtggcgaatcgtctgaagcgtcttgagagccgtaaagatcataatagccagagccagatcaacgaactggagtcattgctgttggcgctgaataacattgatgctagccagtttagcaaataccagttgctgctcgacaccatccgaaaagacctcgcctggaaagccaataacacggaagatcgcctggtgatcttcaccgaaagtattaaaacgctggagttcctcgaacagcaactgcgagcggatctgaaattgaaagatgaccagatcgccacgctgcgcggcgatcagggcgatacggtattgatggaaaccgtagaagcctttggtaaaacgcagtcgccgttgcgtcttctggtttgttcggatgtggcatctgaagggatcaacctgcatcaccttagccacaaaatgattcactttgatattccgtggtcgttgatggtattccagcaacgtaacgggcgtattgaccgctatgggcaaaaacatcagccccaaatccgctatctgcttaccgaggccagcgaaccacagatcaatggcgatatgcgcgtactggaagtgttgatcaacaaagacgaacaggcgcagaagaacattggggacagttcggagtttaccggcaaatttacccaggaagaggaagaagagcaggttgcagagttcatgatgcaggatgatggtgccagcctgtttgatcaactgctgaacagcaacgtctcggaaagcgccgaacacgatctgtttggcgaaatatgcagtgcggtttccagcgatgcctcaatggtcaccgaaacagacaccagcttgtttgccagcgaacaggcgtactgcgaaagagcattgggttacctgaaagccagtggtcaaactatccagtatgaaaccttgcctgataataccttgtcgctggtggcaccggaggagttacgccgccgnttcaaccagctaccgcctgaaattgccccggagaactggcagctctatttaagtcaggataaaaccgtcatcaccgacgcgattgcgcgcgctcgcggtgagcaacatgcctggcccgatgtgcagtatctctggcaaatcaacccggtagtgcagtggctggacgataaaatctcttcggcttttggtcgtcatcaggctccggttatccggctgccatacctgcttgaacccgatgaagatcacttcattctttccgggttattcccgaaccgtaaatcacatccgatggtgaacccgtggatagtggtgagctttaaccgtgaatcgctaatcggcagtcagcctttcgctgagtttttacaacgtcatccgcagttgagtaacaagctgactaacagcggcggtaaagatcgtaatcaccaacgccagcaggatttactggaagcggctattgctcatgcccgggaggtattcatccatgatcggaatgcgtttgaaacgcacattaaccagcaactgaatgagcatctgcaaaagctggacgttttgcgtgggcggcagttgagccaacttgagctggattttgccgataacaaacagcaattgtcagtcaagcagagccgtaaagagcagagacaacgcgaaatcgaacacaattttgacagctatatcgaatggattgaggacaccatgacgactgaaaaagaaccctacattcaggtaattgctgttatcaccggagcggagggttaatcatggcgctggtcggtattaataacgaaaacgaattttactctaaccactatttgggtgaggttttcaccagtgatatccgcgatgtgctggaaccctggatagcccaggaaaatgcagcgcgtgaagcggagcgtgccgntcgtgaacagggcaaagacgtggagccgggataccgcgctccgtggaaccagtttaacagtctggcgactgagtttttccgcaaacttgccgagcacgaaaaacagcgtcagatcccgcagcgtctggccgatcaacgtaatcgctggcagccattgttaaaggcgctgggctacgaaattacgccacagatccaaatgctggatgacgatacaccgctgccggtactggcgcgttacaacagcactgacggtagcccgtggctgtggattgttgaagcacacgatcaggaagaaggaacgctggatccgctggcgctctccttactgaccgcgcaattcccggcggataccgacaaacataagcacgacagcctgcgcaaaaaagccaacggtgaatatcgcagctggcaggatttgctctctacggcggtcttcacccaaaatgaaccgccgcgttttgtgctgctgctcggtaaccgtcagctattgttgttggaccgtactaagtgggcgcaaaaccgtctgctacgttttgattttgaagagattttaagccgtcgtgaaacggatacgctgaaagcgactgcggtgttgttacataaagattctctgctgccgggcagtggggcaccttatcttgactcgctggatgacaattcgcacaaacatgcgtttggtgtttcggaagatctgaaatatgccctgcgcgaaagcattgagttgctgggcaacgaagcgatgcattatctgatcgaccgtggcctggcaaactatacaggtaatcgtgcggtggacccggatgaactgagccgcgaatgtctgcgttacatgtaccgcctgctgttcctgttctacattgaagcgcgcccggagctgggttatgcgccaatgaccgccaaaacctatctgcaaggttacagcctggaaacgttgcgcgatctggagatgatcccactgaccagcgaagaagatcgcaacgggtgctacttccacgacagcctgaatatgctgtttaaactggtgcgcgaaggctacaacggcggcgtgaaaatgcagagtgacctggagagcggcgaccggatcaccatccatagtcatcagttcagcgtcccgcgtctggaaagtcatctgtttgatgccaacaacacgcgcattcttaaccgcgtggtattccgtaacgaaaccctgcaacagattatccaggcgatgtcgttaagccgcccggccaaagggcgctttaaccgccgcggacgtatttcttatcgccagttgggtatcaaccagttgggtgcggtgtatgaggcgctgctctcctatcgcggattcttcgccagcgaagatctctacgaggtgaagaaagccggggaagagtttaacgagctggagacgggttacttcgtcagtaaggatgagattagcaaataccacgaagacgagaaggtctacgagaaagacggcagtctgcgcattcaccgcaaaggcagctttatctaccgtatggccgggcgcgaccgtgagaaatctgcctcttattacaccccggaagtgctgacccgctcactggttaaatatgccctgaaagaactgtttaaggagcagattgatcccattagcgatccgcacgccaaagctgatgccatcttaaacctcaccgtgtgcgaaccggcgatgggcagcgcggcgttccttaacgaagccatcaaccagctggcggaagcgtatctgttccacaagcagcaggcggaaggtcgccgtattccgcaggatcgttacacccaggagttacagcgggtgaaaatgtacattgccgacaacaacgttttcggcgtggacttaaacccggtggcggtggaactggcggaagtgtcgctgtggctgaacgccattagtggcgatgcgtttgtaccgtggtttggttaccagctgcactgcggtaactcgctggtgggcgcgcgccgtcaggtgttcaacaagagcgaactgacctacaaaaaagccaaagatccgagctggcttaacagcgagccggtcgaactggcgatgaacacgccgcgtgaagagacgcagattttccacttcctgctgcccgacggcggtatggctaactacagcgataaaactgttaagcagcgttatccggatgacttcaaagcgctggacagctggcgcaaagagtttattaaaagctttgccgggcatgagattgctgatgtgcagcgtatcagcgaaaaggtggaagcactgtggaacacctatcgccagcaacttaaagcagaacgtctgaaaaccgccgacagctacccggtgtggccggcagaaaacagcgagcagacgcgttcttcgctgagcagtaaagatgaaacctttagcggtcgtcttgaagataacagcgcctaccagaagctgcgttgggtaatggactactggtgcgcgctgtggttctggccgatcgacaaagccgatgagctaccggatcgcggcacctggttgtttgagattgaaaccctgcttgacgggattgtaatcacggaaaaagtcactgaagttgcggagcacaccaccggcgatctgtttgccgaagaaggcctgctgcgagaagagtcttcgctgttttctgttgctggtcgtctgaaaaccgaggtgttgttccgtcatttgccgcgtctggcgattgtcgatgccctgagaaagcagcaccgtttcttccactgggatctggagttctgcgacctgtttgccgagcgcggcggttttgacctgatgctcggaaacccgccgtggctgaaagtggaatggcaggaagcgggcgtgctgggtgattacgagccggaatttgtgctgcgtaagctgagcgcctcgaagctggcaacgttgcgtattgatacctttaaccagatcccggcgctggaagcggcctggcgcagcgagtatgaaggctgtgaagggatgcaaaacttcctgaatgcgcagcagaactacccggtactgcgcggggtgcagaccaacttgtataaatgctttctgccgcaggcctggcgattaggggcgcataaaggcgtggcaggtttcctgcacccggaagggatttatgatgacccgaaaggcgggcaattacgtgcggcggtatatccgaggctgagggcgcattttcagtttcagaatgagttaaatttgtttgttgaagttgatcaccatgcgaagtttagcagcaatatttattctgctagccctagcacagtgggatttgaacatatatctaatttgtatgctccgcaaactattgatgcatgttttgaacattctggcagtggggacattcccggtctcaaagacgagattgagagcgagggaaaattaaaagttgtatggaacacatctggccaccgttctcgattaataagtatcgccactcatgagctagaattatttgctcgtctatatgacagcgaaggaacgccagcctggcaggcacgtttgccagccttacatgctaaacaacttgttgctgtactggaaaagtttgctaatcagccgaatagattaggtgatttgcaggggcagtatttttcaacggttatgttcgatgaaacatatgctcagagggatgggacaattttacggcagactcaattccctcaagattcatcacaatgggtactgtctggccctcatttctttgttgggacgccgttctacaagactccgcgcgaaaactgtacgcttaacagcgattatgactgcctggacttgctaactctgcctgacgactatctgccgcgcactaactacattccggcatgtgatgcacaggagtatgcaaaacgtactccatgcgttacatggactgaactggctgaagatgaaccgaagaaggtaacagattattatcgcttagctatcagagccatgttggctcaatcgggggaacgtacactaattagtgctatttatccgccagaaataagtcacatgaacgcagtacgttcttactgctatagctcacagaatctgttactcgaacattcaggtatgtgtttttctttaccttttgattttatttgtaaatctactggcaaggcaaacttacatcagatgcttgatggtttctcatacgtattattcaatccgagacaaaaggcattattatactgcttagtattatcattaaattctgtaaatgatgtatatgctggcctttggcaatcctgctacaccccagacttcaacacccagcgttggagccgcgatctcccgcagctcccccaggatttcttcgccaaactgaccccagagtggcagcgtaactgcgctttacgctctgactacagtcgtcgtcaggcgctggtggaaatcgacgtattggtggcgcaggcgctggggttaactctcgaagagctgcttaccatttatcgcgttcagttcccggtgatgcgccagtacgaagcggatacctggtacgatcaaaacggtcgcattatctttaccccaagcaaagggctggtgggcgttggcttgcctcgcaccgcgcgtaaagctgacctgaaaaacggctttgtctttaacgtcgacagcccggagtggaccggcggtgactgcaccgatcaagctatcggttgggatgatgtcaaacatcttaaaaccggtaccgtcagcgtcacctttgatgattatacccgcagcgacgaaggtgagcgccgtaccgtcacctggcaggctccgtttatcaagccagatcgcgaagatgactacaaagtggcctgggcgttctttgcacaagataaggagagcgcctgatgttgccgtccgttgtcagtcggcaggtcgccgacagcgttgccgcctttttacgggcggcgttcccgctaaacagcccgctgtttaacggtgagaataacgataatgtctcaatgctggagcaatttctggcccagccggaaacgctgctgaaaggaccatacctttccgcccagttgccgtttcgtaaaagtgacttaccgctgaattttttccctaatctgacgctgccgttcccgccgcacgcgcatcaggcccgggcatttcagcgtctgggaagcgacgcgccacagccgacgctggtcgcaaccggtaccggstccggtaaaacagaatgttttatgttcccgctgctcaaccactgcgcgggcgcgtcacaagccggggttaaagcgattatcatctacccgatgaacgccctggcaaccgatcaggccagccgtttcgccaaaaccatcgccagcgatccacaactgcatggcaaggtgaccgtcggcctgtttgtcggcgacagcgaaatcgaacccagcaaaaaaatgtcggcagaaaaggtcattacctgtaagcacacgctgcgcgaaagcccgccggacatcctgttgaccaactacaaaatgctcgactacctgctgatgcgccctggcgatcagccgctctggcgttacaaccagcccggttcattgcgttacctggtcgtggatgaattgcatacgtttgatggcgcgcaagggtcggatctggcctgtctggtgcgacgtttgaagcatcacataggtgtggataaccaacgattcgcctgcgtcgggacatcagctaccgtcggcgacgaactggggcaactgctcgattacgcaaaaacaatctttgaccagccgtttaccgatgacgccgttattcgcgaagatcgctacacggcagcggagtacttgcagaattacgccattgcgtacagtcagtatccggggccggaggtcgcttcggccctggacccgcagagttacgctaccccggtagcgtatcttaacgggcaaatccctttgtggttccccgacagcgacttgcaactcccggacgatctggagagcgacgacgggcgtgaaaagcgtattgcgctggggtcactgttacgccgccacagcgtgatgcatgtcttactccatgatctgcaaggcgggatcctctctgaacgagagtgtctggaaaatctccaggtcatgctggcagaaagcgccgaccatgcccgacgcgtgctgcaaagcattctggcactgatcgcgcaggcacgtctcgaagtaccggaaacggaacacgatcggcaaaaacgtctccaggcgaagaaagcgcgtccggtgctgccgtttgtgcaactgcgctcccagttgtggcttcgtgagatgcgtcgtctggtcgccagcgtggcgaaaacgccccgactggtgtttgccgatgatgtggcggtggaagatcgcgaacactatttgccggttatccactgccgtgactgccacgcaactggctgggccagcctgcgtcatgggcaaagcgttcagttggaaacagacctcgacggcatttatcgccagttctttgaaaaagggcgctccatcgtccttgctttcccggataacaacgaaaaagcggtcagtggcgcacaccagaaactgtgtcctacctgtctgaaactgaaccgacagtccagcgtccagtgtggacattgcggtcatatggaactgttgcaggtactgatcccggatatgctcaaagagcgtaaggacgagctggagtttgctaatgaatgcccgtactgcaacagcaaacaggggatttcgattctggggtcacgggctgccagtctgtcggcggtgatgattcaccagctttatggcagccagttcaacgaacataaaaagctgattacgttttctgactcggtacaagacgccgcgcatcgtgccagcttctttactgcccgtacctggccgctgatgattcgtgggcaaatcgccagtgttcttagcgaaaaagagacattaccgctggatgcgttcgcggcgcgtgtttgccaacaaacgcgtgaacgttcaccggacgatgctcattttgcagcaaacttcatcgcaccaaatatgcagtggctgaatgattatcagacgctgaaaaatgaaggcaaactggcggagaactccgatctgccggagctggtttccctgcgcctcgactgggaggtgtacagcgaatttaccctgcgcgcgcgtatcggacgtacgctggaagccaccggttatgccgttgccggagtggataaagatcgcttcaatccggcaattaccgccctgcatcaacagctttgtgaagagctgggtgatgagatgtctggtgtgagcgtcgagcaggtagcgcacctggcgctgggggttatctggtatcaacgccaggccggggccgttatgcatccggcgttcgaaagttatcgccgtgatggcacgacctttatgatgacgcaaaaagagcgtacctcgcgctatatgccttctatcggtccgaaaacgcgtaaaccggcttatgcgtcgtttgaaaaaattaatggtttccatcgcctgattggcgcgaagtctaaccccagttggtatcagcattggatcaatcgcacgctgagtaacggcaataatctgtttatcagtagcgttgcggaaacagtgttacgacgcctgtttacggcgttgaaaatagccggagtagtaaaagattttgacaccaaagggcgtgaagcctggggactggtgccttcggcgctggtggtgagccgtgacgttgttcagcttaattgctcatgttgccgtgaggttgtccgggctccggccgatcaaggctggcagtggcgtaatgcgccttgtctctctttacgttgtgaaggtcgttaccaggaagtcgacaatacggcgacctggcgttgggagaacatggacatcgcgcgcgtacagggcgcagaacacacggggctgcttagccgtgaagatcgcgaagtcaccgaaaaatcgttctaccgcggcaaccaaccgtggaatatcaacctgttgtcggcaacaccgacgctggagatgggtattgacgttggggatctttccaccgttttactctgttctgtcccacctgctcaggccaactacttgcagcgtattggtcgcgccggtcgtaaagatggtaacgcgttaaacattaccgtggcagaagggaacccgcacgatcagtttttctttgaagaaccactggagatgatgcagggccaggtgcaggctcctggcgtcttccttaatgcaacggctattctcgaacgccagctggcagctttttgtatggataactgggtgaaaaccggtgtaccagaatccgctatctgtaaaaacgtcaaacagatgctggatgagctggagttcgggcgtaaatcgggttttccgtataacttactgcgatatatcgaacagcatcatgcggagattgctgcgcaatttacggcaatcttccccgatcttgccgcagaaactcgccaacagctgttgtcttatcttcagggcgcgccaggacaaagctcgctggtgcagcgtatcgaagaagcgttaaaactgctggtggaagatcgcaaatctttgcgctcacgcatcgataaactcaagcgcagtatcgataaactggagaacgcgccgcgcgatcaaaactttgatagcgatatgcgcgagttaacttcggaacggcaggcgctgatggcgctggtcaatcaaatcaacaataagcaaacgctgaatttcctcacggatgaaggtctgctgcctaactacgccttcccggaagccggtattacgttacgttctgtgctctggcggcgtaaagaaggcggggaagcacgtgaatatcaaaacaccactttcgaatatgaacgcccggcatcaacggcgctggctgagctggctccgctgaataatttctatgccggtgggcataaagttgaaattgagcagatagacctgaaggtctctgagccggagaactggcgtatctgtagccactgtaactacagcgaaaatatcgaccagacgggcgaccagcataaatattgcccgaaatgtggcacaccggggtgggccgatgccggacaaaaaaccacgctgctgaaacttcgccaggtttatgcccgcgccagcgcacgtgatagccagatcagcgacgagagcgacagccgtgaacctgctttcttccagcgtcagctattggttagtttcgaaaaagaagatgtatcggcggcatacgcgattgaggaaggcgaagttccgtttggttttgaatttttaagcaaagtcaccctgcgggatatcaacttcggcaaaatggcggatgatgccaatgagttgatgattgccggagaagcgaagaagcgaaccgggtttaaagtttgcctcgggtgcggcatggtgcagcgtcctcgcgatcatgaaccacgtcatgatttgagctgcaaatatcgcacggaaccggaaaaggcgaagttcgaagattatctctacctctatcgccagctggagtcagaagcgttgcgtattctgctcccggtaagcagttacagtaatgaccgtgtcgtggaggcttctcttggggcggcgatccagctcggtcttaaacattacttcaaggggaatgtcgatcacctgaaaggcgttgtgtaccgcgagccggaaaatgaaggcgaatcctggcggcagtatctggtgatttacgataccgtcccgggggggactggttctcttaaagaactgatgcgcactcccgacaatttgctgaaattacttgaactggcctatcaggcaatagtggaatgcagttgcaacaatgatacgcataaagatggttgttatcgttgcgtttacgcttaccgtgaccgtgggcgcatgaagtatgtctcccgcgatcaggcgcgtctcttgctggcgaaaattttgcaggcaagagattcgatacgggtaattgattccatcaaaaacatttccctcgaagccatgatgggcagtgagctggaaaaacggtttattagctgcctgcaagaaaataaaaacctgattgtcagtcgcagttacgcgcatcagggcgctgggtggattattaacacccgcagcgaaccgatgatgagctggcatcttaaagctcaggtggatttaggcgctaaagaggcggtggggatcccttgtcgcccggattacgtgctatatccgcttatgcagtctgatgccattaaaccggtggctattttccttgatggctttgcgttccacaaaaatagcgtcgcagaggatgtgcaaaaacgccaggcgattcgggatagcggtaatttctgggtgtggacagtcacgtgggccgatctcaaagagccagggcttaaacatgttcaggatgtcctgggacttgggcataacccggatatgaaacagcctaagttttataacctgtttcatgataccaactttgcggcccttgaagcgtcgttccgggaacgcaacagttttgcactgctgctggattatctcgccgatccgggcggaagaacgcagttatggcagagaatggctgctgcacatgcctgggtgtggttggatgtgaagaagtcacaggacgcgggaacgaaacaaaagtatgcctatgaaatgcaggaaaacgcgccagcttggcggctagcagagcttttgccagacgaaccgtttgtctttggtggtttactcgatagctgtaactcatcgccgcaatttattgagctggcttcggtgttaccacaacaagccattaaaccgacgaccagcgtcgcacaaatgcgcagctggctgcgtttgcatatctgttttgacgatcgctatacgcaggatgacggttatgaagcgggactcaatggcttctggcgactggtaaacctgttacagttcctgccggatatgacctttaccagccgtaaagccgtgcatttaccgcaggaaagcgttgacactaaagtttcggcaacgccagaggcagtaccagagactgatgagagttgggctgagattattgagtttggcttattaagcgctgaagagatcgcgttgcttcagtctcattctctctctgcgccgactctcggctacgaattgcaaaatgatgaaggtgaaattattgcggaagccgatctcgcctggccatcacaaaaatgggcattgattattgataatcaagaatttattccattattcacaaccaggggttggcacgttgcattcgggccaattgacgaaaatacattgcaacatctgtccggaggtgacaaatgacggtgcaaacgcccaaggtggcactttctgatggttttctgggcgcattcgcgcggatcccaaaggcacagcaaaaaaaggtgcaggaattcatctccaaattccgtcaggacccgaccagtaatggacttaactatgaaaagatccacgatgcgcgcagtaaaaatgtccattcggtgcgaatcgatcaaacttatcgcggcattgttctgaaacctgaacagggtgccctgtatatgctgatgtgggtggataaacacgacgaagcatatgactgggcgcggcggcatgattgttcaattcacccggttaccggcgcgattcaggtcattgatattagctatatcaaaccggcagcggaaacagtggttgataaaccgaaactcttcgctgcttacagcgcggaacagattctggctctgggtgtgccgcctgtctttattgatcaggtgatggcgcttaccgatgaagccgggcttaatcaacttgaaagcataatgccagcagaagcctgggaacctctgcactggctggcagaagggctggattaccaggaagtgctggaagagtttaacgatcatcgtgatgagcctgttgataccaacgactttatggaggcgattgaacgaagtaaacgtcgcttccatgtcgttgaaaatgaacaggagctgttgcagatgcttaatgcgcctttagaaaaatggcgtgtatttctgcatccgagccagcgaaaattggtggagtcgcccgctaatggtccggtacgagtactgggcggtgcaggtacagggaaaacggttgttgcgatgcaccgtgcgcggtggttatctcagcgtctggcagataaacccggtaagaaagtacttttcacgacctttacgcgtaacctggcggcagatattcgcgctaatctccagcggttgtgtacgcgagaagagatggcgcgtattgacgtcgttaacattgatgcctggatgagcgaccaactaaaacgccacggttatgatttccgcgtggtatacgacagcgatgaagggcgacgcaaatgctggaactatgccttgcagcaggcacctgccgaactggggctacctgataatttctatgctgaagantggcaacgcgttgtccagccaaatgcggtttacacccgggaggaatacctcaaagtcagccgggttggacgtggtacagcgttatcccgtattcaacgggcgaaaatctggccagtctttgaagaattcagagcacaaatggcgcgtgccaaactgcgcgaaatgggcgatgccatgcatgaggctattgttctgtttaaagaaaagcaggtccaactaccttatagcagtattgtggtcgatgaagctcaagatatcggtgccccggcatttactcttattcgcagcctggttcccgagtcgcccnacgatctgtttattgtcggggatgggcatcagcgtatttatcgcaataaggtcgttcttggtcagtgtggtattaacgtccgtggtcgtcgcagtaaaaaattgaagattaactatcggaccacagaagagacgcgtcaatttgctgttgggctgttaactggtgtgaaggttgataacntcgatggcgaagcggataccagtaatgattatttgtcattactgcacggggaaaagcccatgattacgcatgcggcagatttcaaagaagaggctgcaacgntcgtcaagcaaattcaggcattgctggcgaatcaggttcgttctcaggatatctgcattactgcgcgtactaaacatgnttgtgaccgctacgcatcagcactgaatgacgccggaattgagacatttaatttaggcaatgatagcggtgacagcgatgcacgccctggcgtgcgggttgcaacgatgcaccgtattaaagggcttgagttccagtatgtgttcctggtggggattaacgaaggcgttgtgccggaaataaaagcattagcatccgatgatcccgttgaacagcgtgatgcattatntaatgagcgcgcgttactgcatgtggctgcaacccgtgccgtaaaagggctgtttgtttcatcatctggtgtccctagtccgctattagtggctgactgataatatgtccaaaacaggccaggagccgaaacgctcctggtctatataaccgttctggcaactggcgatatttatattgcttagctcccaacagccagacaatatcaacttagaaattatattcgcttatgcggtttgcatattgcacagtacaacctgttttctctatatctaacgtaacgtcaggatgtggatgattttgggatggggtgacacactggacaaatatagctggcacgaaaaggctggcatttccagctgaccaatagtctctggaaccatgatgatgataaaataaatatcttaagttttaaacgtatgatgccaggattaccagaattataaacgaatatattagttcttttctatttgttcaggaggggtataaaaattgcaattgttaatagtatcgtcaggacgataaaaagataatcatgacaaaggcaattgaactaaaatgattgacattttacaggtggtttgtcagtgatttcttgttattcataatttattttccgtaaaaaatagnnnngtgatcacctgaataaaggtaatctcatattttgatgagtatagtgattttttatttctctggtgaggaatgaaggaaatatcaatggtaaggaacgtcagagaatcagggaaaattaaggtccctcagaaacacaatgccgttcacttaagcggggcggcactgtgtttcacaggataacgggtttttgatatcttaaccgccctcgcccttgatggtcgggggcgttttgttatgaacaccacttccagagcccccgcagatgctccagtcgtttcgggatagtccccggtgacgccgtgtttcccagcactatcatttctgtcacgataaactggaacgcgaacttaaagctgatctctgacgccgcttttgttgcctcacgccgtatcgctccgccggtaggcgcggtcatggcattcagtagaatgtgattcccagattcattaacgccaccagacgcatgacggggtaggcgctctgccgctcagtggatgtgttggcagagccataatattcacgcagctcgggttcatcaggtgtcctgaactgtgcgccatcaatggcaaaaagttgcaggccgtgccagtcatccttcaggtaacgttccgcgccccatgtctgtgtggtctggcggaagagccattccaccggggcggcccccacgcgctgacgcgcctgggtgacagcgctgcgggcgccagcaggttcatccccgcttcgccatccacgctcaggttaagacgacgaacggtcgcatgagcagaaagcgtcaggaagtgctgtatccactcggtgggaaggtgctctgcaaacagttgcgtagagggtggtggcataagcggatggtcactgaaagtggtataagaaaatggctccttgttgtggaagtcgttatagtgccgcacgccggaggagttaaaagcgctgatggatgcgaataaatcaaattaatgaacgctcacctttcgcgccaaaactgcaaaattgcttctacaaacctgtcagaaataatcccccgacgggctgctgagctgaaatgactgcttcgcantgccgtcgtccagttctccggtgaccggtacgctgaaccgtaatatcccgtgcttaaatcgtccggatcttcatcaggcgcgttcgtcagccctcttgcaccttgttgctggaagtcgacgaaaataatattagctaaaatattattttgataattgccataaatagcttcatacgcatgagggaaattttctttccagtaccaggtggtatcgccgcaaaaccacggcgcgtcagtaatattattaagctgagaatggtattgttttagatccctacgaaaggcttcaaccatatgattaaagtgttgaggatgtgacgcgtagtcactggtcattaagtcaaattcgccttgcatccagcatacgccgaggaatttgttctgcggattttttaccagtgcggctcgcgttctgctgactaaatcctggtatagcggagtatccgttccccaacgacaagcatcatggctggctccgtgccgttctgaatatgtcccctcgctgcctgcggtaaaagccgatccgccacggcaacacggaacgatgagaatccctgcattatcaggaatgaagggcagtaatttccgtgcaatatgcagtgcctggccaacggtgccgtactgtgtttgatgattcgttgccagaggatggtgataactctgcatatcctgaacatcgtgtgggcagtgagtcagtggaataatgtcgttaaagtgacatgacgggcctccgggatgcgtatgcgcaaatctcgctaattgtttaattctgggatgaggcgcatcttccctgtccggtaatggcagtccttcgccatacgccatggcattagactgaccagcaacagtaagaacatagtaataatcaggcgatattattgcgttcatataaatttcgcgtaattgaaatgacaaattgatagcagggcccctttaccggggccctgaagcgttagttttgtactgtgactttattatccttcacagagatcaaaactgaatccgtcaccgctttgccgcctgcagtttcaccgccaataatcaatagactattattccagggcaatgatactccgtaggcccgaccttgcgataattcacccgatttatcccatttcccgttatgccaaagatgaatatcagtgctatatgattttttcaggccttcatgcgcatagttcttaccgttttggtaattttctcgtgaacctttgaatccggcccctccggcaaatataagagaatcattgcttatccccgcaaaaccgccagcgacgccatctggtgatgagacgggagcaagcctattccattttaaattattaccggtgaaatcaagttcaaatacggcatccgttcgcaatccgggtttggcttcgccattaataagccaggttttatcacctttattcacaaccgccgcaccagccgtcccgtaccagggagattcgccagcgtaactccattgctgtgtagagggatcaaaagacaacagaaacttattaaagaaataatcttctgcttttttgtcaaaatagtgtgcattgattttatctacagcggttgaatcttttccagcttcgttgagatcttcaaaatagccattgaagatattctggttaacaccgccagtaacataagccttgccgttgtgtacaaaagtcacatggcccgccatgcccatcggcgcgtgcgatatcaatttaacccagctattggttttggggttgtatttgtgtacgtcattaaatacctgagtcaagccctcgctgtttttgccaatgccgccaaacacatacagattgccatcaataaatgccgaggttgcttgatctcttggtccaccagggaatgcagctaacgctgtccattttttatctttggcctgtgtctccagcttgtaccatgccgtacctgcgctacctaaaccaatgtagacagtgtcgttatcaattgctccggtaccacttttaaatggtacaggagtttccggtaatacagacgcgtttgcggcaaatgaagccattaggatagcaagcgccgttattgttttattcattgtgactgtctcctgtctactacagtttaaatgacacaccaatgcgataactgttttccgataaattatctctgccgttgtaaacaccctgacggtccaggtagtcatattctatgtatggcgtaatatcgggcgtcatatggtattgtagaacaaatgcattttccgtcgcccatttcttatggtttgcatagcgataatcgttctgtttgctgtatagcgtcgtttgccatgcgaaggtgaaatcactattaatatggtaagtgacatatccatcccaacgatgaacgttatcacgagacatatcaccggataagtcttgttgtcggtaagctttccagtcgtaacgatagcgaatgccaaaattaagatcttttgtcgcgtcccaggacagttttacgtagggtccgtagcgtgtgccgttgctgctaaaatgcgttaacattcccgggcgcaccgtccattgatcatcaagtttaatcgcgtaattaacttcaacctgaacatcattgagtgcggcattttcctttttattatcatgaatggtattccaggtattactttccatgcttgcccaccatccattttgccatccctcactgactttgagtcgagtctcataggcgtggcttccactacgatatccaccacgtacgtccagtgtcgcagcctgagaaattaatggtgacgaaaagcacagtaataatacgccagaaagtattttagcctttttcataaatttcactcatttgtaggatacagaaagcaatacaaagcccgcataaacaattagcatttatgttgtgtaatatttttttgccaggcttatagtgtctttggcaaccggtagctgtattttatattttttgtataatgtctcctgtgaaaaatctctttccacattatttaaataaacagagagccagattaaatacctgagtataaaatctattctgatgtttaattgatttgaatgttcgtaagctatatcacttactcaattcattttacccagagtcataaaatagagtgtctgttgatctcattttcatattcctttcagactgaagtgcgttttcatcacccgatgagaaagaactgaagtgatgtttgccatagattgcaagatgccctgtctcattgtctatcgtggtgcacctttatacctgttataccagatcgaaaatcacgcaatccatacagcaaaaccagatttgcaattcgtgtcacaaaatatgtcgatctttttctaagaagaagatgccatgtgaagccagacgaacacttgcggtggtcttcaaaaactaaagatcttcgtttaactatttgttttataaataatttatttagagtctaaacaagggaagctttgcaagctaactcagtgagcttggtgtaaatcagtgtttacccgccatcaggctgagcataattctcatcatgaaatatgtttcctggtttgtggcttgtaactggtcacttctgaagtcgatctggagaggcttattgatgttggtgttttcaggatgatgtttcacttantttgtttgccgtatcgcccggcgaatggctgtgattgaggaaggtttaagtcgtagtgaccaaagctatatttaccaacgaatgtagatgaaaaaatcatctcctgcgttcccccatatctccaggataaaaaggaatgtaacaatctcatggcgtaagctgacgaatcagccaggaataatcgctagggacctaagaattagcttgataatagccactaagaaattactgtgttccatgaaatagccattttgtggcaaatggagttgactaataatgtcatatgtgagacggctagttgaacgaatattaaattttgctgaattttttatgttgattttacttgttacagaacatatcacatgatatatagataagattagttgcattaatgatgagggttattattagattcgtatccgattgataaatatataaaggtacatagcatgcaagagcatagcgtttgtntggcaannttattataattaactgttgctactccatttaagttcactcagaagaactggtccacttacgttagttattaagcaaacgttcgcttttataaacataatcaggataaaaatgttggattattgctaacccagcacagctagtgcgcgtctgtaattataagggaaaaacgatgaagaataaggctgataacaaaaaaaggaacttcctgacccatagtgaaatcgaatcactccttaaagcagcaaataccgggcctcatgcagcacgtaattattgtctgactttgctttgttttattcatggtttccgggcgagtgaaatttgtcgattgaggatttcggatattgatcttaaggcaaagtgtatatatatccatcgattaaaaaaaggcttttcaacaacgcacccgctattgaacaaagaagttcaggctttaaaaaactggttgagtatccgtacttcttatccgcatgctgagagcgagtgggtatttttatcgcgtaaggggaatccgctttctcggcaacaattttaccatattatctcgacttccggtggtaatgccgggttgtcactggagattcatccgcacatgttacgccattcgtgtggttttgctttggcgaatatgggaatagatacgcgacttatccaggattatcttgggcatcgcaatattcgtcatactgtctggtataccgccagcaatgcagggcgtttttacggcatctgggatagagccagaggacgacagcgtcacgctgttttatagagatagttgagataccagggatggtgttaaaaactacattattcttacgatatatcaaaaatgattaaccatttattaattgatgttattgtaagtatgattcttaattatcataataaacattangttaaccatatccatacaaaatncaatggtttatgttcttcaaaataaataaacanaatcattcataaattnacacatcacttaaactctcctgtttctgcactttttcctttattttttaagcaactggaagttaatccactgcaatctattgttatattgaatcaaatcaatgaaaatagatgttatcacatcagtgatattttatttttgtatgatatttaatgtaattgactgatagccacatcacttcgtgtgtggttatctttttatctattgggctaattttgaccgattgaggtttcctataggtattcattcaaatatatctcagttaggagtactactattgtgagtaaacgtcgttatcttaccggtaaagaagttcaggccatgatgcaggcggtttgttacggggcaacgggagccagagattattgtcttattctgttggcatatcggcatgggatgcgtattagtgaactgcttgatctgcattatcaggatcttgaccttaatgaaggccgaataaatattcgccgactgaagaacggattttctaccgttcacccgttacgttttgatgagcgtgaagctgtggaacgctggaccctggaacgtgctaactggaaaggcgctgaccggaccgacgccatatttatttctcgccgcgggagtcggctttctcgccagcaggcctatcgcattattcgtgatgccggtattgaagctggaaccgtaacgcagactcatcctcatatgttaaggcatgcttgcggttatgaactggcggagcgtggtgcagatactcgtttaattcaggattatctcgggcatcgaaatattcgccatactgtacgttataccgccagtaatgctgctcgttttgccggattatgggaaagaaataatctcataaacgaaaaattaaaaagagaagaagtttgatttaacttattgataataaagttaaaaaacaaataaatacaagacaattggggccaaactgtccatatcataaataagttacgtatttttt

SEQ ID NO: 1685 - DNA, 12520 bp, Escherichia coli
  Strain O55:H7
  modified_base (876)..(876): a, c, g or t
  modified_base (1038)..(1041): a, c, g or t
  modified_base (1047)..(1048): a, c, g or t
  modified_base (4268)..(4268): a, c, g or t
  modified_base (10033)..(10033): a, c, g or t
  modified_base (11674)..(11674): a, c, g or t
  modified_base (11779)..(11779): a, c, g or t
  modified_base (11790)..(11790): a, c, g or t
ctgtttgatatgtaaattatttctcttgtaaattaatttcacatcacctccgctatatgtaaagctaacgtttctgtggctcgacgcatcttcctcattcttctctccaaaaaccacctcatgcaatataaaaatctataaataaagataacaatagaatattaatctaacaaataaactgaaaaagtttgtgcgcgatgctttcctctatgagtcaaaatggccccaaatgtttcatcttttgggggaaaactgtgcagtgttggcagtcaaactcgttgacaaaacaaagtgtacagaacgactgcccatgtcgatttagaaatagttttttgaaaggaaagcagcatgaaaattaaaactctggcaatcgttgttctgtcggctctgtccctcagttctacagcggctctggccgctgccacgacggttaatggtgggaccgttcactttaaaggggaagttgttaacgccgcttgcgcagttgatgcaggctctgttgatcaaaccgttcagttaggacaggttcgtaccgcatcgctggcacaggacggagcaaccagttctgctgtcggttttaacattcagctgaatgattgcgataccaatgttgcatctaaagccgctgttgcctttttaggtacggcgattgatgcgggtcataccaacgttctggctctgcagagttcagctgcgggtagcgcaacaaacgttggtgtgcagatcctggacagaacgggtgctgcgctgacgctggatggtgcgacattcagtgagcaaacaaccctgaataacggtactaacaccattccgtttcaggcgcgttattatgcaatcggcgaggcaaccccgggtgctgctaatgcggatgcgacnttcaaggttcagtatcaataacctacccaggttcagggacgtcattacgggcagggatgcccacccttgtgcgataaaaataacgatgaaaaggaagagattatttctattagcgtcgttgctgccaatgtttgctctggccggaaataaatggaataccannnngcccgnnggaaatatgcaatttcagggcgtcattattgcggaaacttgccggattgaagccggtgataaacaaatgacggtcaatatggggcaaatcagcagtaaccggtttcatgcggtaggggaagatagcgcaccggtgccttttgttattcatttacgggaatgtagcacggtggtgagtgaacgtgtgggtgtggcgtttcacggtgtcgcggatggtaaaaatccggatgtgctttccgtgggagaggggccagggatagccaccaatattggcgtagcgttgtttgatgatgaaggaaacctcgtaccgattaatcgtcctccagcaaactggaaacggctttactcaggctctacttcgctacatttcatcgccaaatatcgtgctaccgggcgtcgggttactggcggcatcgccaatgcacaggcctggttctctttaacctatcagtaattgttcagcagataatgtgataacaggaacaggacagtgagtaataaaaacgtcaatgtaaggaaatcgcaggaaataacattctgcttgctggcaggtatcctgatgttcatggcaatgatggttgccggacgcgctgaagcgggagtggccttaggtgcgactcgcataatttatccggcagggcaaaaacaagtgcaacttgccgtgacaaataatgatgaaaatagtacctatttaattcaatcatgggtggaaaatgccgatggtgtaaaggatggtcgttttatcgtgacgcctcctctgtttgcgatgaagggaaaaaaagagaataccttacgtattcttgatgcaacaaataaccaattgccacaggaccgggaaagtttattctggatgaacgttaaagcgattccgtcaatggataaatcaaaattgactgagaatacgctacagctcgcaattatcagccgcattaaactgtactatcgtccggctaaattagcgttgccacccgatcaggccgcagaaaaattaagatttcgtcgtagcgcgaattctctgacgctgattaacccgacactctattacctgacggtaacagagttgaatgccggagcccgggttcttgaaaatgccttggtgcctccaatgggcgaaagcacggttaaattgccttctgatgcgggaagcaatattacttaccgaacaataaatgattatggtgcacttacccccaaaatgacgggcgtaatggaataacgcagggggaatttttcgcctgaataaaaagaattgactgccgggtgattttaaaccggaggaataatgtcatatctgaatttaagactttaccagcgaaacacacaatgcttgcatattcgtaagcatcgtttggctggtttttttgtccggctctttgtcgcctgtgcttttgccgtacaggcacctttgtcatctgccgaactctattttaatccgcgctttttagcggatgatccccaggctgtggccgatttatcgcgttttgaaaatgggcaagaattaccgccagggacgtatcgcgtcgatatctatttgaataatggttatatggcaacgcgtgatgtcacatttaatacgggagacagtgaacaagggattgttccctgcctgacacgcgcgcaactcgccagtatggggctgaatacggcttctgtcgccggtatgaatctgctggcggatgatgcctgtgtgccattaaccacaatggtccaggacgctactgcgcatttagatgttggtcagcagcgactgaacctgacgatccctctggcatttatgagtaatcgcgcgcgtggttatattcctcctgagttatgggatcccggtattaatgccggattgctcaattataatttcagcggaaatagtgtacagaatcggattgggggtaacagccattatgcatatttaaacctacagagtgggttaaatattggtgcgtggcgtttacgcgacaataccacctggagttataacagtagcgacagatcatcaggtagcaaaaataaatggcagcatatcaatacctggcttgagcgagacataataccgttacgttcccggctgacgctgggtgatggttatactcagggtgatattttcgatggtattaactttcgcggcgcacaattggcctcagatgacaatatgttacccgatagccaaagaggatttgccccggtgatccacggtattgctcgtggtactgcacaggtcactattaaacaaaatgggtatgacatttataatagtacggtgccgccggggccttttaccatcaacgatatctatgccgcaggtaatagtggtgacttgcaggtaacgattaaagaggctgacggcagcacgcagatttttaccgtaccctattcgtcagtcccgcttttgcaacgtgaagggcatactcgttattccattacggcaggagaataccgtagtggaaatgcgcaacaggaaaaaccccgctttttccaaagtacattactccacggccttccagctggctggacaatatatggtggaacgcaactggcagatcgttatcgtgcttttaattttggtatcgggaaaaatatgggggcactgggcgctctgtctgtggatatgactcaggctaattccacacttcccgatgacagtcagcatgacggacaatcggtgcgttttctctataacaaatcgctcaatgagtcaggcacgaatattcagttagtgggttaccgttattcgaccagcggatattttaatttcgctgatacaacatacagtcgaatgaatggctacaacatcgaaacacaggacggagttattcaggttaagccgaaattcaccgactattacaacctcgcttataacaaacgcgggaaattacaactcaccgttactcagcaactcgggcgctcatcaacactgtatttgagtggtagccatcaaacttattggggaacgagtaatgtcgatgagcaattccaggctggattaaatactgcgttcgaagatatcaactggacgctcagctatagcctgacgaaaaacgcctggcaaaaaggacgtgatcagatgttagcgcttaacgtcaatattcctttcagccactggctgcgttctgacagtaaatctcagtggcgacatgccagtgccagctacagcatgtcacacgatctcaacggtcggatgaccaatctggctggtgtatacggtacgttgctggaagacaacaacntcagctatagcgtgcaaaccggctatgccgggggaggcgatggtaatagcggaagcacaggctacgccacgctgaattatcgcggtggttacggcaatgccaatatcggttacagccatagcgatgatattaagcagctctattacggagtcagcggtggggtactggctcatgccaatggcgtaacgctggggcagccgttaaacgatacggtggtgcttgttaaagcgcctggcgcaaaagatgcaaaagtcgaaaaccagacgggggtgcgtaccgactggcgcggttatgccgtgctgccttatgccactgaatatcgggaaaatagagtggcgctggataccaataccctggctgataacgtcgatttagataacgcggtcgctaacgttgttcccactcgtggggcgatcgtgcgagcagagtttaaagcgcgcgttgggataaaactgctcatgacgctaacccacaataataagccgctgccgtttggggcgatggtgacatcagagagtagccagagtagcggcattgttgcggataatggtcaggtttacctcagcggaatgcctctagcgggaaaagttcaggtgaaatggggagaagaggaaaatgctcattgtgtcgccaattatcaactgccaccagagagtcagcagcagttattaacccagctatcagctgaatgtcgttaagggggcgtgatgagaaacaaacctttttatcttctgtgcgcttttttgtggctggcagtgagtcacgctttggctgcggatagcacgattactatccgcggctatgtcagagataacggctgtagtgtggccgctgaatcaaccaattttactgttgatctgatggaaaacgcggcgaagcaatttaacaacattggcgcgacgactcctgtcgttccatttcgtattttgctgtcaccctgtggtaacgccgtttctgccgtaaaagttgggtttaccggcgttgcagatagccacaatgccaacctgcttgcacttgaaaatacggtgtcagcggcttcgggactgggaatacagcttctgaatgagcagcaaaatcagataccccttaatgccccatcgtccgcgatttcgtggacgaccctgacgccgggtaaaccaaatacgttgaatttttacgcccggctaatggcgacacaggtgcctgtcactgcggggcatatcaatgccacggctaccttcactcttgaatatcagtaactggagatgctcatgaaatggcgcaaacgtgggtatttattggcggcaatattggcgctcgcaagtgcgacgatacaggcagccgatgtcaccatcacggtgaacggtaaggtcgtcgccaaaccgtgcacagtttccaccaccaatgccacggttgatctcggcgatctttattctttcagtctgatgtctgccggggcggcatcggcctggcatgatgttgcgcttgagttgactaattgtccggtgggaacgtcaagggtcactgccagcttcagcggggcagccgacagtaccggatattataaaaaccaggggaccgcgcaaaacatccagttagagctacaggatgacagtggcaacacattgaatactggcgcaaccaaaacagttcaggtggatgattcctcacaatcagcgcacttcccgttacaggtcagagcattgacggtaaatggcggagccactcagggaaccattcaggcagtgattagcatcacctatacctacagctgaacccgaagagataattgtaatgaaacgagttattaccctgtttgctgtactgctgatgggctggtcggtaaatgcctggtcattcgcctgtaaaaccgccaatggtaccgctatccctattggcggtggcagcgctaatgtttatgtaaaccttgcgcctgccgtgaatgtggggcaaaacctggtcgtagatctttcgacgcaaatcttttgccataacgattatccggaaaccattacagactatgtcacactgcaacgaggctcggcttatggcggcgtgttatctaatttttccgggaccgtaaaatatagtggcagtagctatccatttccgaccaccagcgaaacgccgcgggttgtttataattcgagaacggataagccgtggccggtggcgctttatttgacgcctgtgagcagtgcgggcggggtggcgattaaagctggctcattaattgccgtgcttattttgcgacagaccaacaactataacagcgatgatttccagtttgtgtggaatatttacgccaataatgatgtggtagtgcctactggcggctgcgatgtttctgctcgtgatgtcaccgttactctgccggactaccctggttcagtgccaattcctcttaccgtttattgtgcgaaaagccaaaacctggggtattacctctccggcacaaccgcagatgcgggcaactcgattttcaccaataccgcgtcgttttcaccagcgcagggcgtcggcgtacagttgacgcgcaacggtacgattattccagcgaataacacggtatcgttaggagcagtaggaacttcggcggtaagtctgggattaacggcaaattacgcacgtaccggcgggcaggtgactgcagggaatgtgcaatcgattattggcgtgacttttgtttatcaataaagaaatcacagggcattgctaatgcaggtacgcaatattacctgaagctaaaaacctgcacgttagccctttgtaggccagataagacgcgtcagcgtcgcatctggcataaacaaagcgcactttgccgacaatccgaactgagcctgccattggcaggctctggtgttcttttacgctaccatgctaataatcagcacaataatcagcccaaccacggagttgaccagctccagcagaccccaggttttcaacgtgtcttttaccgacaggtcaaagtaacctttgaacaaccagaaagatgcatcgttaatgtgggtgagggtgttggaacccgcagccgtcgccagcaccagcagcgccggattcacgccaaccagctgaccagttgctggatcaaggattgcagcactgataatcccggcggcggtcatcgccgaaacgacaccctgacccgtcgccagacgaattagcacagtgatcagccatgccataatgtagggcgagatattgccgtgggacatcaacatgccgatggtgtcgccaatgccggtgtcgatgatagtttgcttcagcacgccacccgcaccgatgatcagaatcaccattgcaatactcttcaccgcgctttcaaaagcgttcatcacccactgcatgtcatgaccacgcgcggtgccaaagagtacgaatgcaaccaccatcgcaataaacatcgcaatcggcgaggaaccgataaagttaaccacttcccaggcaggggtatcttttaccagccagatattggcgatggtggtagagatcataatgatcgccgggatcagcggcaccagaatcgaaacgccgaaagagggcagattgttcatatctaccggttgatctgctttcaggaatgatggcgttgggcgctcaagattgccgaggaacttcggcaggatcagacctgcgcagattacacttgggatcgtcaccagtacgccatagatataaaccatccccatatctgcgccataagcattcaccagcgccaccggacccggctgcggtgggaacagtgaatgtgcggtagtggcagctgctactgccgggatcgccagtttcaggaacggaattttagcttcggcggcaatgacaataaccagcggcgctaacatgataaaggccacttcatagaacatcgccagaccaaaaatcaggccgatgataatcaccgacagctgtacatagcgcagaccgagacgcgccagcagcgtatgcgctatctggtgagccgcgccggagtcgaccatcaatttaccgatgaccgcaccgaacaccacgatgatagccagttcccccagcgtgttgccgaagcccgctttcatggtgtgcagcagcgacatcaaatccatgcccgccagcatcccgacggacagcgccgccaccaacaaagccaccattgaattgattttgaacttcaaattcagtaccagcatcagaccaatgccgaataccacccagagaatgttaagcacatgcataacgttttaccttacctggttgaaccgttgttattttgggcgacatgttatgtaaattggtcaaccattgttgcgatgaatgtcacatcctctgatcaataaccatcgattaccctttgctgcaatttgcagcaacaaccatgagagtgaaattcttgtgatgtggttaaccaatttcagaattcgggttgacatgtcttaccaaaaggtagaacttatacgccatctcatccgatgcaacgccacggctgcggtctggttgttcatccggatacctaaacaactccagggttccgcgtctctttgctgtggaacccactatgtgaaagaggaaaaatcatggaacagacctggcgctggtacggcccaaacgatccggtttctttagctgatgtccgtcaggcgggcgcaactggcgtggttaccgcgctgcaccatatcccgaacggcgaagtatggtccgtagaagagatcctcaaacgcaaggcgatcgttgaagacgcaggcctggtgtggtctgtcgtagaaagcgtaccaattcacgaagatatcaaaacccacactggcaactatgagcagtggatcgctaactatcagcagactctgcgcaacctggcgcagtgcggcattcgcaccgtgtgctacaacttcatgccggtgctcgactggacccgtactgacctcgaatacgtgctgccagacggctccaaagctctgcgcttcgaccagatcgaattcgctgcattcgaaatgcatatcctgaaacgtccaggcgcggaagcggattacaccgaagaagaaattgctcaggcagctgaacgcttcgccactatgagcgatgaagacaaagcgcgtctgacccgtaacatcatcgctggtctgccaggtgcggaagaagggtacaccctcgaccagttccgtaagcacctggagctgtacaaagatatcgacaaagccaaactgcgcgaaaactttgctgtcttcctgaaagcgattattccggttgccgaagaagttggcgtccgtatggctgttcacccggacgatccgccgcgcccgatcctcggcctgccgcgcattgtttccaccattgaagatatgcagtggatggttgataccgtaaacagcatggcgaacggtttcaccatgtgcaccggttcctacggcgtgcgtgctgacaacgatttggttgatatgatcaagcagttcggtccgcgtatttacttcacccatctgcgctccaccatgcgtgaagataacccgaaaaccttccacgaagcggcgcacctgaacggtgacgttgatatgtacgaagtggtgaaagcgattgttgaagaagaacaccgtcgtaaagcggaaggcaaagaagacctgatcccgatgcgtccggaccacggtcatcagatgctggacgacctgaagaagaaaaccaaccctggttactccgcaattggtcgtctgaaaggcctggccgaagttcgcggtgtcgaactggcgatccagcgcgctttctttagccgttaatacccaccggcatggctgcgcgccgtgccggctccttcttccttgccngtcactctctgaagacggattctggagtttacgatgactactattgttgacagcaatctgccggttgcccgcccgtcatgggatcattctcgtctggaatcacgcattgtgcatctcggttgcggggcgtttcaccgtgcgcaccaggcgctgtacacccatcatctgctggaaagcaccgacagcgactggggtatctgcgaagttaacctgatgccaggcaacgaccgcgtgctgatcgaaaacctgaaaaaacagcaactgctgtacaccgtggcggaaaaaggcgcggaaagcaccgagctgaaaattatcggttcgatgaaagaagcgctgcacccggaaatcgacggctgcgaaggtattctcaacgcgatggcgcgtccgcaaacggcgattgtctccctgacggtcacggaaaaaggctactgcgctgatgcggcaagcggtcaactggatctcaataacccgctgatcaagcacgatctggaaaacccgactgcgccgaagtccgcgattggttacatcgtcgaagccttgcgtctgcgtcgtgaaaaagggctgaaagcatttacggtgatgtcctgcgataacgtgcgtgaaaacggtcatgtggcgaaggtcgcggtactggggctggctcaggcgcgtgacccgcagctagcggcatggattgaagagaacgtcaccttcccgtgcaccatggttgaccgcatcgttccggcggcgacgccagaaaccttacaggaaattgctgaccagctgggtgtttacgacccgtgcgccattgcctgcgaaccgttccgtcagtgggttattgaagataacttcgttaatggtcgtccggactgggataaagtgggcgcacagttcgttgcagacgttgtgccgttcgaaatgatgaaactgcgtatgctgaacggcagccactctttcctggcgtacctcggttacctcggcggctatgaaactattgccgacaccatgactaacccggattatcgcaaagcggcctttgccctgatgatgcaggaacaagcgccaacgctgtcgatgccggaaggtacggacctgaacgcctatgcgacgctgctgatcgagcgtttcagcaacccgtctctgcgtcaccgtacctggcagattgcgatggacggcagccagaagttaccgcagcgtctgctggacccggtgcgtctgcacctgcaaaacggcggcagctggcgtcacctggcgctgggcgtggctggctggatgcgttacacccagggcgtggatgagcagggtaatgccattgacgtggtcgacccgatgctggccgagttccagaagattaacgcgcagtatcagggcgcagaccgcgtgaaagcgctgctgggcctgagcggtatttttgccgatgatctgccgcagaatgccgactttgttggcgcggtgactgcggcatatcagcagctgtgcgaacgcggtgcgcgcgagtgtgtggctgcgctgtaactaactgattaccctacagacttactggtcaatcaaactgatatttggttgaccagttttcgtttttttgcccacctgtacgtgccaacttccagtgctaatggtatagtttgagattaacgggggccgtaaaattgcccgttgtangccggataaggcgttcacgccgcatccggcaaaaatttgattaaccgcacctaacggacacaacaccatgaaatctgccacctctgcgcaaagaccttaccaggnagtcggggcgntgatccgcgatctgatcataaagacgccgtacaatcctggtgaacggctaccgccggagcgtgaaattgcagaaatgcttgatgtcacgcggacggtggtacgtgaagcgctgatcatgctggagatcaaagggctggtggaagtgcgccggggtgccggtatctatgttcttgatagctcaggcagccacaacacagacagtccggatgccaacgtctgcaatgatgcgggtccttttgagctgttacaggcgcgtcagttactggaaagtaacatcgccgagtttgccgccctgcaggctacccgcgaagatatcgtcaaaatgcgtcaggcattgcaactggaagagcgtgaactggcttccagtgcgccgggcagcagcgaaagcggtgacatgcagttccatctcgctattgccgaagcaacgcataacagcatgctggtggagctgttccgtcagtcctggcagtggcgggaaaacaacccaatgtggatccagttgcacagccatctggatgacagcctgtatcgcaaagagtggttgggcgatcacaaacagatcctcgccgcgttaatcaaaaaagatgcccgagcggcgaagctggcaatgtggcagcatctggaaaacgttaagcaacgtctgctggaattctcgaacgttgacgatatttattttgacggctatctgtttgattcatggccgctggataaagtcgacgcctgacttat

SEQ ID NO: 1686 - DNA, 18016 bp, Escherichia coli
  Strain O55:H7
  modified_base (1434)..(1435): a, c, g or t
  modified_base (3437)..(3437): a, c, g or t
  modified_base (5764)..(5764): a, c, g or t
  modified_base (5766)..(5767): a, c, g or t
  modified_base (7140)..(7140): a, c, g or t
  modified_base (7897)..(7897): a, c, g or t
  modified_base (10942)..(10942): a, c, g or t
  modified_base (14439)..(14440): a, c, g or t
  modified_base (14713)..(14713): a, c, g or t
  modified_base (16717)..(16717): a, c, g or t
  modified_base (16869)..(16869): a, c, g or t
  modified_base (17316)..(17317): a, c, g or t
  modified_base (17621)..(17621): a, c, g or t
aagcgcaagggtaaacgttccttgcgctttcttaaattaagaagtcgcaatgagtattactttgtaaattgcagggtattgtttaaatatctatataacctgaatgttagtactcattcttctcagtggttatttgccaatataattccattcaccattttttaattcaaacagttctggaagagatgacggttgcagagtcatgcgtttgagtggcgcatcttcatcaccggggataactttatatcccatttttgcatggatctccgcggtacctggataggcttctataccaattattgggtcattacccaactcaatattagcattaagtaatgcggcaagggcgaatccggaagaatttgctacccctgagacagttattatctgatcaatatagatatcaattcttggctgctcattggtccatctttttgcctgagaagctggaagggttgaaatatatcctgtcgtggttccggcgtaacctggaacattgcaaccagggcctaatgttatttcatgaactgtatagtcctcaacaggatcgaaagggctcttcataaataaatttagccgtaaaccttctgctaactctgtagcagcatgcgcctttttacatataccaccatatatttcgtctaaagctgaggtgattttcaagtttcgatagagcatacgtcctgttgttgtaataccatcggattctctgcatgcttctgtcacataattaaatggccaggattctttactaatatcaagttttctaatttcgacaacgctttttccatcgtaattatggttattgccacgagcaagaggcagaagatagatattttccgtatccaggcgtgcacgttcatatttacgtgttaactcactttcgacttttggatgatgaaggaagtgattatctgtaataatttgactctgaaggacattgcttaatggcatagacataatagttaccttttatgagtatttcactgatgtttagaaaaatagataaatttttctgtagtaaaaagagaagtaaacaaatgacatgcatgtttctgttgtagtgatatcaactctacacagtgatattaaagggtaggaaacactctaagtatcaaaaaacgctcatttaaaattatttgcatgcaatttaaaatcatatcttattactaattggaatttgatgttgctatattgaggtctatattaataatgcctgtgaatggtgtttttgatgtatttgatatgttatcaatttatattatttacaaactaattgtttcaaataatacatggctgattatgcggaaataaataatttcccaccggaattaagtagcagcggtgacaagtattttcatctacgtaactattcggaatattcagaatatactagcggtttttttttgagtttgatgatttttatcaaatcannacttttttcctgaaaagtcagtagatattcataggcaagtaaggttttatactttgctgacaggattcaggcctgtctcagactgacatggatgtaatgaacaaaagggaatggctatggaaaatgagcatcaatacagtggtgcccggtgttcagggcaagccgcatatgttgctaaacgtcaggagtgcgcaaaatgatgcgccaatcacttcaggctgttttacctgaaatttcaggcaataaaacgtcattgctgcgtaaatcggtatgcagcgatctcctcactctttttaattctcctcattcgacattaccgtcattacttgtttcaggcatgcccgagtggcaagtgcataacccgagcgacaaacatctccagagctggtattgccgtcagctgcgttctgcactgttatttcatgagccacggattgcggcgttgcaggttaatttgaaagaagcgtactgccacactctggcgatcagccttgagataatgctgtaccacgacgatgaaccgctaacgtttgatctggtctgggataatggcggttggcgcagtgcgacgcttgagaatgtcagctaagcacaatctccagctcgcgcagttcacgccagaagcgttcggcaactggattcatgcgggtattcatccggtatgcgtaggcctgaatcgggatcaccagttcgtcccgattcagcacaacgagctgcccgctgcgaatttcttgttggatggcatactccggcagccaggcaatcccacagccgtcgagggcaacctgctttaaaagctcgctcatcgaagagacaaaaaaggtgctgaaacttaactcactgtggcgcgtcagggtgcgattaatcaatcgccccatgtaggagttgcggctgtaattcagtaacggaaagtgtggctgcacgaggttaaaaagtgcttctccatgttcgtcactggcgcagacagggaacaattgagattcaaataagcgaatgtggtcaaacggcgcttccagcaaatcttcgtcgtgaaaggaaaaaatacagtcactttgtccttcacgcagtttatcgaccgcttcatcgacatcaatggcttcaatcgcccaggtaaagagcggcggcatctggctgataatggacggtaacagaccgagggaaagagagtgtgcagcggctatcttgattttacgttgcgcgtaatcgctgccgccacgcagctctgcaaggttgctttctaactgttgcaacagatggcggatctgcgaatggaagattttcccttgttctgagagttgcagcggcgtcacctggcggttaaacaattcaacgccaatcgcctgttccagcgcgcggatgcggcggctgaatgccggttgcgagacgttacgactgactgccgcctgggaaaaattgcggcatttttccagggtcagaaaatcttaaagccatttggtttcaatattatgcaaaaccgcaccacagtcatccattacgttttactctgtcagccgcccttgggggcattctacgtccattagggcggctgacaaccgtttaagccgtttcaaacgttcctttcacgcaggctttgccgtctttgaccatcagtttgccgcgagcgtatacctgctcaatgcgcaattctggcgtcatgaccagtaagtctgcgtcattgcctggcagaatttcgcctttcccggtcaggttaaggaaaccggctacgctactggtgagcgggcgcagggcatcgctgatactgaaatcatagtctttaaccagcacctgcacggtttccagcaacgtttcaaaacctgcaacgccgatatgggttaaattcccttcatcatcgaagaacggctggctaccgttgccgtcggagctgagggtgacgcgtgccagcggaatacccgcctgaacggcgcggacaataccttcggcaggggcgaccggttcgtcaatgctgctggtgatatcgatggtgccgcctttgcgcgcgaantccagcgcctgctcaaacaacggtacgttgcggttaacgtgggtcggcagcagcttgctgatcggcacatcgcagttttccagcaggtcataaataggctgtaatgcctttttactgtcgcccatgtggaacacggtgacgccaggtttaccgccgagcaaaccgccaacgcgggattctgccgccatattagccaggtgataaacgtccggtgcggcagaacggtgatcagagatggcacatttcacgccaatcacacgatcgataatcgccacgtctttttccacggaacccgtaatggtgcgggaagggacatgataagcgccggtcagcatccaggcgctgatgccttcttcattgagcgcacgggtcttggcgagcagggattccgggtggcgagagatagagtcggtgcccagcagaccaaccactgacgtgacgcccgcttccgtcaggcgacttagcgccacttccggcgtgcgcgtcgtgggacctgcttcgccgccaccgccaatcaaatggacgtgttgatcaataaaacctgggcagaggatctgcccgctgagatcgacaaccgtgcagtccggtacaatgtcagaagggatattactggcaacggcgataattttgccgttagcgacgaggacatcgcaaattccccgatcttccggcgcatacaaatgcgctccctgcagcagggtaaaaccggctgcggtataatcaatcatggtaactccttgttaaacaataagctgcataacccagatcgacagcaatgcgttaatcacgcagaccgtaatgatatgcgggtaatatttggcattcacttcggctgtccccaggcagcgaccgacattttgcaccgggttgcccattaaatacatcgcgggcagtaaaacggtgacatcgtgaccggttaatgcgccagcggttgccagactggcggcaacaccgactgcgccgcccatactcattaatgcggctaaaaggacggttgccgcttcaccgggtaatccccacagcgccattacgggttcacagatatgccccacccagtcgagcaggccggtaatttgcagcgcctgaatgatgacaaacgccatcaccacgtttggcagcaggttggtcgtggcgatagtaaagccacggcgcgcgccatcgataaacatatccatgacgtttttgcggacctgagttgtcatgcttgcgctccttgcgttgggttgcgacgttcttcgaagttaagccagacgcgcaaaatgttggctccgacaaatttaaacaccaggatgacggctaaaggtacgattacggacgtgcccagaaaggcgaataccgcgacgccggaagagaagtagttggtgatgatggcgctaccgctggtttgatatgcggcgaaaatcactttatcgcgttcggtaatttcaccttcctgcgccagctctttggtcataccggcggcggcatcagtgttttgcaagttagcgatcagcgccagcgagcagatccctggaatgcccaacaacggttttagcacaggtgtcattaactgctgcgcggcgcgtaatccaccaagaccatcggtaattgaaataatccccagagagagaatgactgacggtgccagctccagcgcaaagagaaagccatctttagcccccgcgccacccgcgccgcgaaatgaggtggtggctccattcgcaccaggcagttgcccaaacgatccgttcagaacggaaaaatcaaaaacgcgccaccagctgtctgttccggaaaaaacaccggaaaaaaagattatggtgagaaaaaaagccagataccctttaatgcccactttttctgtcgccagctccccggctacagcatccccttgttgtgtcataacaatccccattgtttttttgtgtttgtgtgttgcttgagccaggaaaattcctggaacttaaaaaccttatcatccatgtgggtatggggaaaatgcaagtatgtttctggctatgcgttttttgcataggggaaaaattacgctgtgtggaaaaggttctgcgcaggattgagttgcagaaaattcataaacccagtgacaatgacattggtaaataaaaacagaaaatccagggacgaaaacgcgatggcaaagtacaacgaaaaagagctggcggatacgagcaagtttttaagttttgtcctccgacacaaaccggaggcgattggtatcgtactggaccgtgaaggatgggcgaatatcgataagctcatactttgtgcccaaaaagcgggcaagcgattaacccgtgcattgctggataccgtggtcgcaaccagcnannaaagcgttttagttattccagtgatggtaggtgcatccgcgcggttcaggggcattcgacttcgcaggtcgctatttcctttgccgaaaaaacaccgccacagtttctctaccacggtacggcaagccgtttccttgacgagataaaaaaacaggggctgattgcaggggatcgtcattacgtgcatctctctgctgatgaagcaacggcacgcaaagtgggagcaagacacggatcgccggttgtcttaaccgtcaaagcacaggaaatggcgaaacgaggcatccctttctggcaagcggaaaacggggtctggctgacatcaacggttgctgttgagtttcttgagtagtcgtttatgccggctggggtacaaaaacaataaattcaatatattgcaggggttatataggcctgataagcgcagcacatccggcaatgtagcgtttgttatcagtctgaaaggataccctcgtaaaagggtatcctttaataacaactgctgaaattaaagtgatttacggcaggcggtcagttgggggctggaatcagcgtcgcttccggtcataccggttagcatctgcacatagtagtgccgactgtaatcatcagattcacttgtccagtaagctcccggtgtaaattgcgaattactggaaaacgctccaacgttcccccattcaccatacagtgatccctgcgtgcgtttgttttcgccagacgtcaaatgtgtgatgccaggaagattatatccatcatttttagcatgacagagcgcattggcagctagccagatattggtatgatttccattattcacccaccagcctttcagcttaattaaggtctggtaggttgtacctccttgtcggggaacagcgcttattgtgactgacgtttgatcgccgatatttgcgaaagaaactttacccgaagcatcgacagacacccaaccctgtgaacttgaaaacatataatcatcaacggttttacccgcttcaaagttatcattgttgagtgtgtaatacgcccctgcaaagccttcgctcgggaatttagccgtggagaaggtatggttgtttgcagtgacatgaccggacatttcttttatcgattggatgagattcagcgatatgcttaagtttgcctgatgaaccccgttcagcatgggaatgagtgtcgctgttccctcttttccgccagtgacagtcacggtgtactcgccataatttctttggctgtaatcaatatcgctcaacttgagaaagttcacgaaggggcctgactggacaaattccagatgatcagacgtcactatcgggttaccgtacttgtcttgcaatgttagcgtaagttttgcgctctgctggtantcagccttcagagtgtcaacatcggatttcaaaattgacttactttcatcggccgtgccggcaaccaatgtaatggttgcggattggttggctgtgccaggaacttgcacattgactgttaaggtttctgccaatgtactggttattgtcgccgtgacttgcccggactgatcggtacgcgtagttggaatattaactaccgggctgcctttggtgtctaagccatgactaatatcgacaccttcaaccgggaatccgtaatcatcttctactcgtgaagtgatggtgctgctatcgatgccgtcggcggtgatggtgtcaggagaagccacgacgctcacaacatgtgccgttttagcatctgccttaaccgcaaccgttacctggctctgaacgggaacatctttgcccattatggccgtaacggtatagacattcactttgtcactggtcagcgtcactttggcctgacctgactggtcagtaaggacttcccctgtattgcttagcgttgcaccttcaggcgttacgctaaaggtgataatttgccctggcatcaattcaccccgcgcatttctcgccgttgcggtcagcgtaataccctcactattatggaccgtagtttctggtttcgatgatgttaactcgagtttgccatttgccacattcacgtcaaccttactactactgttattgtccagcgttgccgtcacctgataaaccccaggttgggtgctgagaaggttaacgtacgcanaaccgttattatcggtgtaagccgtatcgcctatcgtaatgttagttgttggctgcgcacttaatctgacgcgttgacccgcgattacattgttaaacgcgtcctggacgagtatccgtagcgtgatgttttcgcccaccgttatcgttttttcggctccggttatacttattaccttcgccgaactttcatccggtagcactgataaactaaacgttttattatcggaagcttgcgctttccggctcaccacgacgttatgttgtccggcaatattgctggtcattgttaccgtcgcctgacccagcgtattggtggtgacttctgtttcgcttagagtgacatcgttactctggaaagtgaccaactggtctttaagcggattttggtaagcgtccaggatcgttgccgtcagggtactccccgtactgttacccgcaacaatggaatttaatgaggcagtcagcggctggagctgcgcactgtttgtatccccaataaaagtgacttgctgataagcaacggtattatttctggtcagcgtcgccgtaactgtaaactcacccgcttttgtgcctcgcaatgtgaccacggcatcaccgtttgcatcggtgcgggcggtttcactacttagcgtgaagttcccggtcatggaggctggcaaggtaaatttcacatcctcatccggcaacgggtgtccataaacatctttcacactggcagtcagggtaacgatatttgtattgttagcgatcgcactgcccgacccggcattcaaggtcattaccgattgttccctgtttgggaccacggtgatcgtgaccgactggtgaatatttttatccacctcaagcgaggcatcgacggaatagctaccagcttttgaactggtcaggtgcacccgcacaataccggactggtctgttgtggcggtcgtgttgtccagttgcgagccaccaggtgccacaaaattcactttcatatcttttaacgggttgttatgaaagtctgtgatgatggcggtcagagtactgccctggctgttgccagcaataatggtatctggatcggcaaccagttgtttgaattttggcgtactcgaatcgctaacgaatttcgcaattatccgttgtgaaaaaccatttggcagcgtggcgctaatcgtattttcttccgcaacctgacttaccatgtttattgtggcaacaccatatgcatccgtattttgctgcggcggttcgacaaactccgcgcttcctttttcattcttaaaggtgacctgatgatttgtcaggggattatcactctcatcagtgacgttgatcgtgagggtattaaatgtctttttatcggcgtaaacgtcattatttgtcgctgataatgtggcaacgcgagccttattctggtttgcctcaatgttataaatatgcgattgcagtggagcattccagttgtgaaggctaagttgtgcccttagtgcagtcccttgcttataggccggataattcgcggcataaacccccggctgctcttcgtgccagacaatcgtggcgccaggtttgctgttttcgacagtaacggcttttaccaattcctctttttgatatgcaaccggttgattgctatcgtctttcagttccaccctaaccttgatgtcgtctccggcataatacgatacgttatcaattgttattgatgaatggtcgcgggatgagacaacagggacgatattaacgacgatggattcttttaccgcactctcaccgttaatttgcggcgtcagtgttactgaacctgatgtcgttccggcggtcagtatctgtgtgtaactaccatcaccgttatctgtccagtcagacagggtgatatcctgaacgccttcactgcgggtttgcagcgccagccccggcaccggagttccgtcggaatcgtgcgcagtaacggtcaatgtggtcgtcgattttttatctgcagccacggttagcggattgacggataacagagaatctttctggcttaatgtcggagcctgaataactaccatgctttgttcatgccgtgacaggttaccttttacatcctcggcggtaacgtctatcgaccatgtattatcggtttctggggtgttagtgaagcggtaacctggcagcgtgaccgtgatatcttttccagacgtgctgactttacctccggcagcttccagcgcagcggcttcgatgttatagcctttaagggcatatttggtctgtagcgaggaaaccagcggttttatttctccagacttccctttcaccggatccagcagactcaggcgaatcagctctttcttgcggtattccagaacgatgttgttgttgcgatcaatcaggtcataacgactaccggccagactgcgccgtccggccacttcgtccggattaagctgtttctgcattgaactgctgggttgccaggtcagatcaacggcaaaacgtgtgtcattttcaccttgcttcccctgacgctgttccgcactgagagtcagaagcgggaagggggtatagttgaggcctgcggtaatagcatgggggttactttgacgatcattcttgtcaaacagcgccacttcatcgccatagtattgttcatagaccagttttccccccagttgtggccaggcaggtaaccagccttccgcgcgtaaatcccagccgttggccgggcgggcttcgaagtcgttatccaattctggtgcgctacgccagccggtcaggccgatataagcgttgctgctcaacttcagataatcacgccagtattctgcgccaagccctgcgcgggagtgatagcggctcaggtcgtggtcaaaaaaaaggttgatgcctgacatccagctggaggtgaaatgacgccagcccaaaccggtgttgatctgggtacgatcgtctgttcggtgaagggtatgctggctgaagagcagataatcaggtgtgtcataccacggatgcaggaagtcgaattgcgaatttttcaggctaaaatcttcatccacacccagagagattntcgcagtaccaaagttatttaaccaatcagtcatcgcgcctgaggcttctgaagacgcccaaccacgcgccatgccgctggcctgctcactattcatatcttgtgaaagcagagtgccaactcgctgcgaggtgctggctatttgattctccagcgtgttttcgccattcgcaggcggtacggcattttgttgctcatggcttttctgcgaggttgttgccggaacatccagttcttcaccctggcgcacgttatcaaagccgcgagcaaaagtacggaactgattaagacgacgaagctcctccagtgaaataccgaagcgattagcaacgctttgcgctgattccagcgcaccaagcgtgtaaggcacagtattattttctagtagaggggggggcagatgaaactgtcgtctgaggtttagcatgtaccacattttgtgccgtcgccatgacggggaaaaaaaattgtgtaaataaacaaactccggcggtcaggcggcgtattttgtcacccagaccacataaagagttttgatcattattttttatttgatgcgcatttgtcgaagccatagtgaccttccgtgaaaaaacagaattaaacttgttttttctagcacggagatataatgcgatcctgactataatatgaccagaaataatgaattagccgtggaattgctaaaccaggaataataccggcggtggctgagtacctccaaagaaaaaggatattttaattattttacgtgatgtgctgaaaagttaaattagttaaattacttaagaataattcgtatgcaatttgaatatttgcatcccgcagattaatgctgcgataaatagcgccgctgcgccgcagagtgtggcgctggcgagcgccgacgttccgttgccgagcatactggtcagcgccgggccaagaatttgcccgataccataaatgagtgtcacaaagcccaaaaggttaagatttcccggcacgctaagctggcgggcgatggtcatcaccagcgaggtcgttcccataaaggtgccgccaaaaccaatactgctgatgatgagtaataaaggagagctgctggcgagggttaacagcacgcagatcgcctgcaccagcaaattcgcggtcaggcaaggtaatgctccccaccgtttggctgcccacagccagccaaagcaacctgggacaatcgacaagccaaccagtgtccagaggtgagccgtcaacacaggctggcccgcgtctttcgccatgagcggcaggtaggtggcgacgatgatataaccaaaacccgccagaccatacagaatcgccagtaaccaccagctcatgggttgttgcgcgatttttgccaatggcgctggcgggataacgtgtttattcgacgggatgagcagcgccagagcaagcaatataatggcagaaagtgctccggcaccttgccacaacgtttgtgaagagagggcaaaatgcaggcctgccagcacatattcattacccagagcgatgccgacgccaacaccagaaaatagcgccgcaaggacaaagggatggcgagtatgttgcatgatgagtgttgagccgaaaatcaacatcccggcgctggcgactcccgccagaaagcgaatgatgaaaaccagaagaaacggcggcagccacgccatcgcgaggattaataatccggttgcgagggcggaagctaacaggaacgggcgcaggcgtgagggtaaatgaaacgcgccgaatgaaaacagcaggctccccgccagatacccggcatagttaccactggcgatccatgagagttcgctaaatgaaaactcgccttccgccagcatgactggcagcatcggcgtatagagaaagcggcctaaacccatacctaaggtcagaaccagcatcccgaataacgcggtgctgaaagaaaaacgttctacgggatgcgatgtcgaattcatgttctgcctggtttgtattattttgagttaacaagttaataacaaaaaaggagaacctgccagactgttatcgtgattttgtcgacgtaaagcgataaaaaagattcggttcgccaacgatatagatgttgccgctatcatccatcgctatcccttccgcctgcttgatgttgtgtgaaaggccatacttacctttggttaacgacatttcgccgatcacgtcacctctcacggtcacttcctgcagggcgcgtgactcatgtgacaacaccagcaacgtatttttctgtgggttaaattccgcgccagaaacatcgtctaaagtaaactgacgctgcaacgttttatctttgctgatatgcaactcatcgctacgcaatagcccggttactttgtagacctctatcggatttttctctttaaaaaaccagaaggtatggtcctgagaggagtaagccagcccttcaaagccacagttagttggtgtttcctgcaatgggattttaatttttttgaggatgctcacttccgagtcagcgttaagtgaaatcacataaatggcgtagtcacgttcatcactgatgacaaatttattatcaccaatgtattcaatcgtctcgagatccttaacaaaatcgagcggaatggtgcggatcaagtcgccctcggtcgtcatttcaacgatggttgcaggtttgttgatagtgctaaataaggtattgctctgcgctgaccaggtcagtgaggagatatttttagttactcctgtaatctctttaccatcgatagtggcctgataattctgaaaccctgcgacatgctggcttttacggacgcaggattgcacaaaaaacaggcttgccgccacgatggcgcaaagaaaaacgataaaggtgatgcgctttttcaacttattgctccttattattgcttttttctcgtcaaattcagtgcgacagataaggagtatacggatgaagcttaatgaattcttaacgcgggcgatgaaatagtaaacgccgcagggggcggcggttgtctctggatggcagaacattttcagcttacatcgactgataaatgcgcctcatctatgaatgatagatgaggcggttaacgtttaaatgttaatctatatcgtctgccatacccactctgtttgggtgattaatgaactattcttcaactatatatgttggctgataagacgttaaacccggaatggaaaatctcctattcacttctttctttaaacgggcttgattaaaactgttactgtcctgttgctcggtactgttcttggcttgtttatcggtactgtcattgacctgtttatcgatattgtcattggcttgtttatcggtactgtcattggcctgtttatcggtactgtcaatggattgtttctcggtactgtcaatggattgtttctcggtactgttattggcttgattcacgatattatcattgttcagatatgctccctcaagatagacatttttcgctctgacattgtaaaaacaggtatttttnnaaagcgtttttataaatattgtattgtcaaaccatgcgtagtcaaataggatattcgaacaatttgcaccagtacaattagtattgtagaattttgcattcgaaaagtttgcattagagattttacaatttgttaaattagcgtttgaaaagttggtatacatgcagataataccagtaagattatattctgaaagatcttttcccgatagatcggaataatttagtattgcgccagtaagaattactttaggtgttcccggtatttgaggtnttccaggtattccaggtattttagatgtttcatatagaatcacggttgtgaaatctatgtgttcaagatacgcgttactaaggtcacttccagtaaaggttacgccagtgagaacttttccgttgaagttactgtttcgtagatttgcgtttttgaaatttacataagtcaagtggcgaactttacgaaaatcattattttctaatgaggcattttcgaattctgcattacgcagatcacaatcggtaaaatccacgccttcacagatcgtaccggagaacttggcatttctaagaatgctgccattaaaattgacattccttagcgccattttcgacaagtctatgtcggttaaatccatctctgctaaattcaacccttcgatacaccgttgacccgttgcatcttcaggaatagcagtgctaatagtattgatgacaacatcacctatcttgacggtcattgtaattcctgcatcagagatagagagttttcgcgtaagacgttcactcttatctccagtgatactcttctgagcaacgtaaaagcgctcgcatgtctcacaaaatcttttccagctctcatttggggtcagattattgtccgggaggaaattagcaatgctataaagatcgttcaggacgctacttcttatttcaggagaggcgcattcaataatttcagaggtggatattgtatttttaattttatctatattatccgtgagatttcgtgatcctgctatatttggctgctggtggttttctttgtagtattgcagcaaattttcccattgtaagtttgtaaacgagaaagtttcagtcttgttattgttatcccgtatggttaattgattttctactgggtcaaaagaaatcatgaagttattcaggtgttgatattgatgagtggcatctaatttcacttcaaatgaatttgaacttttgcaggcatgttttaaaaacttttcacagggaaggtgttgatctttatctacttgttgtgggtcattgtgcaaaacagagaaaatactctctttcaaattgttcttgtcaatatagattggtagttgcgctttttgttccattattttaataaactgctgcagttgctcggttttaacattgcagtgatgacttatatctttatctttatctttatctttatatttaacagttaatacgctttcattatcatcttgtcgattaaatattatttttagatcgccatcgtcaaactcatgtaaaccatttcttttggttctgccgatgatttgttctgttgttgatgaatatctatttaaggttaattcaagattgtcgggattagagataaggtgaataaaaagattcagtacacgcttaatcaaaccatcattcaaatgatttatatcataattaatttgtttttgtatggtttcaatttccgtgttaatatcaaatggtaggttgtttttttcatggcaagcttttagtcccgaatacatgccgagtgttgggaaaatatctttgtatatgttaaatagggagcccatatttttatccttgaactgtgaaatattcttctaaatctaaaataatcagggggtggggaaagataagctttgcacagaaacttatcttttaacattacaacacccggtaatcattttatttctctatgcatgattatgggtttaagtataattcaatgtatattgtattttagacgcgcaataggaaggtgctatcaaaaatcgctcattttgtggatgggaaatatttcacggcaggcgagatatttactacaacttccttcatgcaggattatgcgcagccaattatccggttggtatatttaaagatcctattgcctggttgacgcttctgcatcgtaatgcaccacgcactgccagtcgctgccctgctggcaatatatcgcttcggtttgcccagggatcacccattgtatttcctcgccggggggacaggtcagccaaatgcataacccgcagccgccgcgtanatcacggggaatatcgctgacgcgaaaagtcatgcccgctgcctgcaacgccttgcgggtttgtatgacgccgaccgtggagtgaaataaaaataaaaactctttcatcggcgtgtcctcactcgttgaccaattaccgccgcgccaattgngccagcaaattgcgcatcaggatgggtatttaccggcattcgcaggtgagattccagcatccgggcaaacgtctagcaatgactaacgccaccagtaaacagaatcggcgcttcacaggagagacgagcaatgaaattggcactccgccgcgccatcgcgttaatcactccggcgagaatcgcttctggcgcgacgcccgctgagcgcaggctgatcacttctgattcagcaaacactgtgcacatactcgtgatggcgtgcggcgtgacattttcggtaatgcagtcgagttgctcgacgctggtgccaagcgtgcgcgagatcacctccaggaaacgcccggtgcccgccgcgcatttgtcattcatcaggaaatcgcacaggttaccgtcatcatcaagctgaatcactttgctgtcctgaccaccgatgtcgattaccgcgcnngttgctggcgcaagaaaccgtgcgcccagcccgtgacaggagatttccgtcacttgtttatcggcaaaatccaccagttgccgcccgtagccggtgagcgtcagaaacggcgttgtctctaacccttcgcgcagagtttcccaggcttcagtaattgctgttgccggtcgaaagggtgttggaacgaggaaacggcgcgtaatcacgccgtctgcgagtaagatccctttggtggcggtagaaccagaatcaatgccaatcgaatatgtcactgctactccttacagcatctcaataaaggccncgacacgggtactgagctgcccaacatccgaggtggagtagtctgtttcaatagcgatataaggaatgttgtgctgctgacgcacatgacgtttaattgccagcgattccaccgcgtaggtatggcacgcctgcaaaatcacatcaactacgccatcgacctgatattcttccaccatctggctgagcattttcaggcgctgatcgttcggcgaaacacaggagcagccaatcgccagatatttatccgccagcgcgtcgtagacatcgcccgtttctgccacgcattgctcggtcgctttcgccccggtgcagttttcataaccgacaacccagccgccattctcttcaatcgcgcgcaccactttctctgctgcgccgccaatcgggcagccg

SEQ ID NO: 1687 - DNA, 4608 bp, Escherichia coli
  Strain O55:H7
  modified_base (1234)..(1234): a, c, g or t
  modified_base (3183)..(3183): a, c, g or t
  modified_base (3928)..(3928): a, c, g or t
  modified_base (4606)..(4607): a, c, g or t
taaaatgcgcggacgcgggtccagtcgctggccttcttcccactgctgacgaatgcgggcggtcatcgcgtccagttcattgatcaacgcctctttatcgaaccggaaggttgcgccgtaaaccactttcagaatgtcgctgccgctaagcgccggaggattgaactgcccaagatgataaaaattggccagtgcgcgacgttcgcggtttttcagcgcaatggcatcgcgcagagcatcttcgctaatttcgtgcccaaaacgttcttccaccgctttttgtaagcgcagcatctcggctttccataacgcacgcgaggcatcgtctttaacgctgtttggcagctgcatcacatgaacgggcttaaactccgccatgtattcatacattttctttttgccgtcgcaggtggtttcaccgaccaccagatccgaaaagtagaagtaggggcatttatcggttttgccgaagccgtagctacttttaatcagcgggcagaggttgcgcggcagatctttctccgcttcttcaatggtttcatcagaggtggaacagagcgaaaccacaaccgcaccggctgccatcgggatctcttgcggcataaaggtgcagtaagtgccaaccagcggaatgccgcgctccttgagatccatgacggtgagaaagcctttctggcgagcttcagagaactgatcgaaaatggcgggtagatcggtgacaagtgacatgattttccttccccgtaccacgggagataatgaaaagaggccacattattaccattcttttagtatggtttattttgatctctctcgcggttagccacttagtttttcatggatttctaaaaattgccgagggggaacaaggccgggagctgtgacagcaaatataaaattagcccaatacaaccgccaaccagcgtaccgttgacacggataaactgcagatctttgccgatatttaactctatttgccgcgacatatcccgggcatcccagctttttaccgtatcgctgatatggcgcgtcaggaatgcagaaaactcaggcgcgacgcggtgcgcggcttgttccaggtgaccatttaacgacgcccgcaaggcatcatcggcaattaacgtttcgccaaaccattgacctgcccgcgcgatacgttctttcacacgagaatcttcactgttgatatccgctttcagccattcccgtaaatccccccacaattcactgaganaggcttcatcctctttcagatagctttttacggcatcagctcgcgctgtcatttcaggatcgtttttcaacttgtcgatcagggcaaaagtggcgcgatcaaatgcatggcggatctgatgcgcacgatcgcggctgatatcatcaagcaaagaattcaccgcgtcagaaaccaactccgcgctatgttcgcccagccattcggtggggagaattttggctttcagtggatgctcactctccagccagcgaacaatctgctgggcgataaacttgcgcgatttatcgcgctggagaagggcgatcaactgtgcgatcagcgtatccagcagcacctgatgacgatcgtttttggtcatactctccagcatcaacgcactggtgccggaaagatcgaccttatcaatcgcccgatggaccgcgcgcttaagcaggcgctgaatacgtgcatcatcggtcagttcaagaaaaccactcatgatctgcaacagatgctgaccaacgcggcgggcgttttctggctggctaaaccagttgccaatcagcaacgccggttcgtgacgtcgaatcaatgccaccagcgattgggtatcgagaaatttttcctgcacgaactgaccgagattttcgccaatccggtctttattacgcgggataatcgccgtatgacgagaaatgatcggaatcggcacgcggcgaaacagcgccaccaccgcaaaccagtccgccagcgcgccgaccatcgccgcttcagcaatcgccttcacgccgctcacccaaaaattgggcggcaaaaacagcgtaacgacaaaggtagcagcggcgataagcagtaaagagagcgccaacattttggcgcgtctgagttcaatgagtttattcataacgttaagaatagagcctgacggcaggatcgcgcaaaaatcactgctcctctgccagctcggcagcctgatgttggcgcacgcgattaagcaatccggccagggtgaaaacgacgataacgcccgccacaacggctaacagatgaaacggcaagcgaccgccgttaaaccacagccagcggccaatttcgaccgagacagacatcaccatcaggatcaccatattcagcgatgcggagacggtccctttcggtaagttattggaaaacagcgtaaagcggaataaggtcgggaagatcaaaccaatcccgaaagcatacagactggtgcccagcaccgaccacagccagacgtgcggtgacagcagattgccgataatcaacagcgcgaggccgaccagttgaatgggtacggcacgccagataaagcgcggttcggtcggatctttaacgaaacgcgccacgatggcattcgcgacaatcaccgcgccgaacaccggaacctgtgtccaggcgaactgcgaggtcgttaagccgcctgcgtcaatcaggatcaccggcgagacagccacccaactcatcatggggatatagcttaaagagatggttgctgcgccaaagaggaacagccgattgcaaaagacattacgaaaatcgcgcaagacgcttttggcgctaaatggaaccgcgccgcgcttcaccgtctctggcatcgccagcagtaagccaacaaatgagataaaacccataaccgcaatgatggcaaaaaggactttccagtgcacaaagtgcatcagagctgcgccggaaagcgggccgataatcggcgcaatcagtacgatggaggtgataatcgccatcaacttgatcccttttgtctggccgaacgcctcctgcaccgtgacataaccaacggtggcaataaaacagatactggtgccctgaattgcacgcgcgataagaaactgtgtcatagacgttgtgaacattgtcgcagcgcaggcaagggtaaatattagcgccccggtaatcagcactggcttgcggccaatcctgtcggaaagcgnccccagcagccactgcaacgccatgcctccagcgagatagagactgacggcagccggagccagactgacatcggcattaaaatcacggaccacattaatgatcccaggctggatcaggtccgtcgaaagataggcggcaaagtcatacaaaatcaacgccatcgggaaaaacagcgtggcggcatggcgggcaaaaaaacgtggcataacaaacaactccttgtccggagaaccccaacggggaaaacgaaattcaataccgtcggtaatgacgaaaggtaggcgagaaggacaaatgtactgaatttcatgtaatcaaccacactgcctgtgaacacacagacagagaaataccttctgacttcgggtcagaatgtataacgattacaaatagtcatcagcacattacacctcttgaattgatgggttgcatagaaaatatacaccttaagtgtaattaaaatttgcgattaatcaaaagagcgcggtggaagggggaatatctgccgggtacaggacatgtaaaacgcgagtcagtttccggaaaaatgtatcgtttgcagacgaacaaaaatagcctggaaagcgcctcgggaaacgagaaattgccgggtgagaatggttttgttagtcgctaaagtcgggccatcttatcaacaggtgacggatcgccatgacaaacttcacgaccagcacgccgcatgacgcattatttaaatcttttctcatgcaccctgacaccgcncgggattttatggagatccacttacccaaagatttacgtgaactgtgcgatctcgacagcttaaaactggaatccgccagctttgtcgatgaaaaattgcgggcgctacactccgatattctgtggtcggtaaagacccgggaaggcgatggctatatctatgtggtgattgaacatcagagccgtgaggatattcatatggcctttcgcctgatgcgctattccatggcagtgatgcagcgccatatagagcatgataaacgccggccactaccgctggtcatcccgatgctgttttatcacggtagccgtagtccttatccctggtctttgtgctggttggacgaatttgccgacccgactactgcacggaagctttataacgccgcgttcccgctggtggatatcactgtcgtgccggacgacgagattgtgcagcaccgcagagtcgccctgttggagttgatccaaaagcatattcgccagcgcgatctgatggggcttatcgatcaactggtagtattactggttacagagtgtgctaatgacagccagataactgcgctgttaaattacattttactgactggcgatgaagagcgttttaatgagtttatcagtgaactaaccagtcgaatgcctcaacacagagagcgaataatgacgattgcagagcgnnt

SEQ ID NO: 1688 - DNA, 37152 bp, Escherichia coli
  Strain O55:H7
  modified_base (602)..(602): a, c, g or t
  modified_base (11511)..(11512): a, c, g or t
  modified_base (11514)..(11517): a, c, g or t
  modified_base (15870)..(15870): a, c, g or t
  modified_base (18014)..(18014): a, c, g or t
  modified_base (18408)..(18408): a, c, g or t
  modified_base (20239)..(20239): a, c, g or t
  modified_base (20988)..(20988): a, c, g or t
  modified_base (22609)..(22609): a, c, g or t
  modified_base (22615)..(22615): a, c, g or t
  modified_base (31251)..(31254): a, c, g or t
  modified_base (31539)..(31540): a, c, g or t
  modified_base (37020)..(37023): a, c, g or t
gcagagcgaattcataatgatggatggctgttgggaagggaagaaggggaacagcgcattcttcgattgttgttgcagaatggggcagatcctgaatggatacagaagattaccggactttcggcagagcaaatgcaggcattaaggcagcccttgcctgagcgtgagcgctattcatggctcaagagctaaccagagacggatgacaaacgcaaagcagcctgatgtgctacgcttatcaggtctacaaagcccattcaatatattgaactttaaagattttgtagacctggtaaggcgttcacatggcatccggcatgaacaaagcgcactttacctaagccatgccggaacgtggctatgatcctgcaaagataaaacgagtcacaggcgattcgtgagaataaatcaggtgcttcgccactaattctaatttattccattgcccgatacacggcctcgccaatttgcttcagcgcttcgcgataagtttcgctgagtggcaaagcacagttgatgcgcaggcagttacggtatttgccggaagctgagaaaatcgagcctgccgccacctggattttcatgcggcacagctgccgcgngacgcagaccatatcgacctgttcaggcaattctatccacagtaaaaatccgcctttcgggcgcgtaatacagatttcgcagggaaaatattcccgtatccagcaggtataaagcgccaaattgcgctgatagatctgccgcatccgccggatatggcgatgatagtgaccttccagcacaaacgttgccgccgccatttgcgtggacggcacattaaagctgctgatggcgtatttcatatgcatcagtttatcgtgataacgccccggtgcgacccaacccacgcgcaggcctggagcaatacttttactgaacgagctgcacaacagcactcgcccgtcgatatcccaggaatgaatggtccgcgggcgcggatactccgttgccagttcgccgtagacatcatcttcaaaaatcacaatatcatgacgctgagcgagagagagaacggcccgtttgcgcgcgtccggcataataaatcccagcggattattacagtttggcaccagaatgatgcctttaatcggccactgttccagcgccagttccagcgcttcaacgctgatgcctgtttctggatcggttgggatttcaatcactttcacgcccatgccgcgcagcatctgcattgaaccgtaataacagggggattcgaccgcgacaatatcgcccggtttacacaccgccattaacgctagcgacatcgagttatggcagccgctggtgatgatgatgtcatcggcagtgaccaccgagccgctgtcgagcatcaggcgggcaacctgctcgcgcaatacccgctgaccggctagcaagtcataaccgagaacggtttgcagattatgctgcaccacccggcttagctcccgccacagcggtttcaggctgggcgtttcgacatccggcgtgcttttgcttaacggaacaatggaactgtcgctatgcgccaccagcatatccagcacctgatcccactgggtaatttccactgggcgctgcaccggacgcgtcatcggcggcactggcggctgggctttacgttgtgcgacaaaataacccgaacgcggctgcggagtgatgagcttcatcgtctccagcgtctggtacgcctgctgcacggtgctgatgctgacgccgtgctcctgacttaagctgcgcaccgacggcaatttctccccgtgacgatacagcccttgctcaatccgctcggcaagtagagtcgccagatgttgataacgcgtcatgctgtattccttatttggaccatacagaaagaaaaaccggtacagatgaggctaaaaaaccggatgcagatgctgttttaacctgtctgtatgttaaacaaaactaatatttgcatctgtattgtgaactgccagaagacggatgatgaagcctctgaaatatgaggaggcagcagatggaatttcacgaaaacaaagccaaaacgccgtttatcagacttgtgcaactctggcaggcagtgaggcgttggcggcggcaaatgcaggcccgacgggtgttacagcagatgagtgatgaacggttgagggatattgggttacgcagggaggatgtggagtgaggggtatgttcgtcgcggataaacaggatttctctataacctccataaggaagtggttattattgcgaaatcatcgtttcacggaaagacgtcagaatgaaagctacagaagctcgcctactcgattttttaaaacgttcgcagcagtttgttattcccatttatcaacggacttattcatggacagaacaacaatgtcggcaactttgggacgacatcattcgtgcaggaaagcgtgacgatatatcagcgcattttatcggttcggttgtttatatagagcagggattgtatcaggtttctggtatttctccgttgctggtcattgatggtcagcagcggctgacgaccgcaatgttgctgattgaggctttatcgcgccatcttggcgaagacgaagtttttgatggcttttcggcaatgaaattgcgtaattattatttgctcaatccttatgagtccggcgagaaaggttttaaattactgctgaccgagactgataaagacagtttactggcgttaataaaacaaagaccaatgccagaaaactattcccatcgaataatggaaaactttactttctttgatgaacaaattgccaaactcggtgatgacttgatccccttatgtcgtgggttagcaaagttattaattgtcgatgtggcgcttaatcgtggtcaggataatccgcaactgatttttgaaagtatgaactccaccggtaaggcgttaagtcaggccgatctggtgcgcaattttattctgatgggcctcgaaccagagcatcaaacccggttgtatgaagatcactggcgtccaatggaagtcgcttttggtcagcaaggttacagcgaatattttgacagttttatgcgtcattatctgacggtaaaaacggggagatccctcggacagatgaagtctatgaggcatttaaactccatgcccgcagccagagtgttgctgaaaaaggcgtagatcggctggttgaagatattcatatctacgcggagtattactgtgcaatggcattgggaaaagaaagtgacaaatcgcttgctacggcttttcaggatttgcgctagttaaaggttgatgtggcgtatcctttcttactggcgctttatcatgactataaaaatgacgatttgtctcacgaagatttcctgagcataattcgtttaattgaatcttatgttttccgccgtgcagtatgtgcgattccgacaaattctcttaacaagacgtttgctactttttataaggtcattaataaagaaaaatatctggaaagtattcaggtacattttttgaatctaccttcatatcgtcgtttccccaacgatgatgaatttaaacgggaattaaaagttcgcgatctctataacttccgtagtcgtagctactggttacgacgactggaaaacgataaacgcagagagcgcgtggaagagtttacgattgaacatattatgccgcagaacgaaaatttgtcggctaaatggcgcgaagagctgggaagtgactggcagcgtattcataaagaactgttgcatacgttggggaatctcactttaacgcgctataactcccgttacagtgacagacctttcgcagaaaaacgcgatattgaagacggctttaagcatagcccgctctatttgaatatcagtcttggacagtgcgaaaaatgggatgaagctgccattcacgcccgagccgatcgtctgtcggagcttgcggttcaggtctggcaagcgccttctcttcctgaagaggttttagctgtttatcggggacagcctgagaacaaaaccagttacagcctgagtgattatccttttcttgctgatggttcgcatagccgggtgttattcgatcatcttcgcgatgaaattatgcgcctggacgcagggatcacgcaggaagtattgaagctctatattgcgtttaaagcggaaacgaattttgttgatgttgtgccgcaaaaaagccgactgcgattgtcgcttaatatgcagtttcatgaactggtcgatccgaaaggtattgccaaagatgtgacaaatgttgggcgatggggcaatggtgatgtggaaattggtttcagtgacctcgcacaacttccttacattatggggttaattcgtcaggcatttgaaaaacagatggagagcgcgttggtataacgcagcgaaaaatgcccggtagtcctggcgctaccgggtcaatgtatcaggcaactttctgtttacccgcaatcaccccaataaactcctgcacctgcctttgtttacgcgccgacagcttgcacacctggcgcagcgactgcatcagttcgctctcggcggcggcgggtggttgggcggtgaggacaatacagccttccatcactttgacatctaccaccgtgccggtggcaaaaccggcggcttccagccactgacctttcagggtgatggcgggaatacggctgtaatccgggtaacgactcgcataactcacggttaattgacggttatttgccggggagacttctgcttcgaacggttgtgcaatagaatgcgtatcagtcataactgctattccctataaatagtgattgtgattagcggtgcgggtgtgttggcgcacatccgcaccgcgctaaatacctggatatatcatcagtaaatatggggaaagtccagctaaaaattaatgaaaacaagatgaaaattagcgtgaaatataaattttggtgatgtgaataaagcggctatttagccgctttattggtttttcgagggcaggtaaattagtttaccgccgcgtcagtgagtgcatctgcaaggtgtagttgggtttgctgggcggattggatatgattctttaattcttcacatagtttataaaaaatatgtagtttactcattattttttttgcttctgagctaggaggaatagcaacaggacaacctctgagctgggttttattaatagaagctaaattagtggtttgcttacttgcgttagcaaaatattgtcttgagaatgggctattcatatatgtttctaaccaatatggatcaacatcttgccctatatttcgtcctttgaatacatggttttgatttgctatataccagtcatgacaccatactgtagttctcccgactgtatcccagtcgccgccttctgttatcaataaatctcccttgactacttgatatttttctttttcctcaatagggatttcaatctgtttaatttccgtaagatcaagatatccgcgttggacgtttgcaacacgtaaataaggaacttttaccaaagttctatttgataaatttcttcctttagtgataccactttgaatatcaataatatcttcaaataaacaccactcccacccttccggaagttcaaacggtttttcctcatcgctaattggcggcaacggtttttgtttttttatttttccttctttcaccagttgagctttttcctgcgcaattcgtttgagcagttcagaggctggttcatcattcggatcctgcggcacaagtttgcccattacggccagttgcagaatggtctgttttaacgcatccacgctgacttcggtggtaaatagagtgtcgaaatactcgctaatacgcgcccagttttcagccagttcctcggcggtttggctgtctgtaagcgttcccaacagggtttcaaccagttgttgatgtgcgtccagactggtcagggattgctgttccagttggtcgcagagggacattaattctttgattttgtttgcgatgcgaacttgttccaaggatggaggaactggagttattccagaaaaaaattgtttgtcattgattgctggataggcaacccctgtctgacaattttcaacataacaaacaaataccggagaacgtagataataataaatgaaattagcatccatcgccgtatatggatgaataatagcgaaggcagtactagcgatcggttcaggtagtatttcgttttcaataatagctatatttaacaaatacgggcgaacagtagagtatatgatagtcccttgctgaacaatttttctcgctcgcgatggggcatctttcgctgaaagaatagatagctcttcaataattccatattctttatttattgaaccaacatcaatgtaagtaaaatctttatctggagttttttgtccccagtcatgtccaatttcactaatacgcacccactcccatccctccggcaattcaaacggcttctcttcctcactaatttccggcagtggtttttgctttttaattttaccttgcttcaccagctctgctttttctgccgcaatacgcttcagcagctccgacgccggttcatcgttcgggtcctgcggcaccagtttaccgcgcacagccagttccagaatcagctcacgtaatttcttaatgccatataaatcaatttttccggaactgccgcgcccggcggtggaacgggtttgcaacgccgaggtccaggtttccatatgatcaacgatcagcttttccacactcattagttaacctccttgccagacagcgcagcgccaagaatatcgcgcagttgattacgcagcgtctggatctccgcctgctgttttgcatactgcgctaacagctcggccggatcatggctgacggtttccgcctgatgtgggtttttaatatccagattgaagttacgcgcaatcacgtcatcaatgctgactttccacgcctgctcattctctacgcggctggcaaaaccatcggcctcgttaccccaccagtcgatctccgcctgaaactcttcaaacttcatcggcttagttttgctgtagttttttacgcccgccggatacggatgctcatagaaccaaatctctttggttggctgacctttggtaaagaacaacaggttggttttaatgccggtataggggttaaacacaccattcggtaagcgcacgatggtatgcaggttgcactcttcggtaagtagctttttgattttggttttaacgccttcgccaaatagtgtgccatccggcaataccaccgccgcgcgaccatttttcgccagtacttccacaatcagttgcaggaacaaatccgccgtttcgcgggtttgcatctctgccggaaagttcttctcaataccgtcttcttccgtgccaccaaacggcgggttggtaacaatgacatccagttgctcatcccgggaggaaagcggtttgttcagagtgttgtcgtgacgaatttgcactggcacttcaatgccgtgtagcagcatattggtggtcgccagcaggtgcggaagctgttttttctcaacaccgtggatctgttgttgcagcgtctgatgatcggcgacgctcttcacgtatttgttctttacatgatcaaatgcgcaggcaagaaaaccgcccgtaccgcaggccgggtccataatggattcgccgagtttcggatcaacgcgatccaccataaagcgagtgacggcgcgtggagtatagaattcgcccgcattgcccgcagattgcagatctttaaggatctgttcgtaaatatcaccaaacagatggcgttcgctggcgctggtaaagtcaatttcgttcagcttattgatcacctgacgcagtagcgtaccgtttttcatatagttataggcatcgctgaacgcctgcttcaccacgtagccgcgtgggtttttatcgataggcgcagtgaggtttttcaacgccgggaacagatcatcattaacgaattccagcagggaatcaccggtaatgccctgcgcgttggcggcccaactgcgccataaataacgctgtgggatcggatattgatagttatcctgctccagttccagcgcctcttcctgggcatcgaagattttcaaaaacagcagccaggagagctgaccgagacgctgcgcatcgccatccacaccggcatctttgcgcataatatcttgtaatgatttgattactgagctgatagacatgttgtattccatgaaaaacaaggccttctgcaacatgatggttgcagaaggcgcaaaagagagttgttaagcagagcggggcggtaattggtagatttcgttttccagctcgctgagcgcctgattatacccgttacggtcgccaaatccggttttaataatctccggtaaggtgcccatgctgtcgaatggcttaagtttcagcacctgaatactttcgatctcctgtacgcccgcatcggcgtatttatccagcagattatcgagcacggcttgcgctgcttcagagtattttgtgaagtagttccgcttgcgcacgttctcggcgcgctctttgcgggttaacggcggctgaccatacactacgtggcaaagcatgtcgaacgggtcgagatctttaccgacttcttctgccagtacttcccagatgatcccctgttgctccagctcgtgaatgatcgcttctttgcgatcggcgtcctgccacttgcgggtaaagtcatccagcgaggcatattctttgagcagtgttttgcgggtgtaatctttaaaggattcggtaaccagtttaccgtcggcgtcgtaatactgaacacgctgggcaataacgcccactgctacaccgttgacgtgaaacttgcggattttcttctcgtcttcttccggaagtgggccgacatcatcggtatctttaacctggtatggtggcgcaggcggttcatcaacgcctgttacctgttcgtcgtcatgttcgctgatttcttcgagtttctcttcaaaatcagattctggatcggcgatatcctctggtgtggtatccatgactttttcgggaatgccatcgaaacgctcatcggcaaacagttcggtggcttttttaaagtcgaggatggtaaaccagagtttgccgtaacgttcgtcgatgcgtgtaccacgaccgataatctgcttgaatttggtcatcgactggatgttctgatccagtactaccagtttgcaggttttagcatccacaccggtggtcatcagctctgaagtggtcgcgataaccgggtacggttttttcgggttgatgaagttatccaactgagctttgccaatttcatcatcgccggtgattttcatgacgtatttgtcgttctttttcacctgctccgggttgagattaaccagggcgcggcgcatacgttctgcatgatcgatgtcgttacagaagacgatggttttatccatcggattggtacgcttgaggtagtcggtaatggttctggcaaccagttctgtgcgttcgtcgattaccatcgtgcgatcgaaatctttctggttatagatacgatcgtcgatcacttcgccgtttaagtcagtttgccctttggttgggcgccagccttgcagatcaacatcaatatcaacacggacaactttataaggggcgaggaagccgtcttcgatcccttcttttagtgagtagacgtaaaccggatcgccgaagtaatccgtgctggagacttcatgcgtctcttttggcgtggcggttaagccaatttgggtggcggaactaaaataatcaaggatctctcgccaggcgctgtcttcggatgcgctgccgcgatggcattcgtcgatcacgatcagatcgaagaaatctggtgcgacttgtttaaacgctttttggtcttcctccgggccagttatagcctgatagagcgcgaggtgaatttcataagcgggatcaatggtgcgtccgctgactttggtcattgccgtaccaaatggctggaaatcattatttttggtttggtcgaccagaatgttgcgatcggcaaggaacaaaatgcgttttttattttttgatttccacaggcgccagatgatctggaatgcggtataggttttccctgttccggtcgccatgaccagcagaacgcggttttgcccgttggagacggcttcaatggttttgttgattgcctgaagctggtaataacgtggcgatttaccgctgccatcgtcgtaatagtcctgagtaatcaccggaagctgagcttgtgtgtatcctttccagaggcagaatttttgccagagttcagcgggggaggggaagtcatccagcgttatttgcttttcaaggcattcaccttcggctgcggtggcatcgcggaagataaagccatcaccgttggtggcaaaaacaaaaggaacgtccagcaggcgcgcatattcaatgccctgttgcatccctttgccaatttcatgtttgttggcttttgcttcaatcacggctaagggaatgccaggtttgtgatacagcacgatgtcagcagattttaccgttctgcgtgccgcaactttaccacgtacgatgactttaccgtcccggagtttgacctcctgtctgatttgcgttgtgttgtcccagcctgcattgagaatggctggcataacgcatttggtaatgatgtctgcttccgccaggttacttaggttcagttccgccatggggtattctcgcttttatcaggacgattctgattgtacataaaatcaatagcctggctatgatttagggcggtgtttcaacgtaaagtacgtagcagagatcacattgatatctctgttatatcttgcttgaattaatctgggcatatcagagacagataaacagaagttacaggaaccatatcaactctaacaaaatatataaaaatcttatagttgcgtttctttcgagcaagaaagataatgttattgttgattgtttgattgggtatatgaaatggaagctaaagaatgtaaggtgcaggatatccttactgaaaacaaaaagtttattattccttcttatcagcgtccttacagttggacggtagataatgcagagcaactcattgatgacatttataaaagctctcaatcagaagagaatgaatattttattgggagtatgatttgtatcaataaagggcaaaatcagtatgaagttgtagatggacaacaacgtcttacaacgttaagcattattgtctccgagctaaaaaaatcatcccgattcaggggataaaagatgatttgcaaaaaagagttctgcctattgatgtttattctgatgaaacagatgaaccaagactaattgttagaaaaaaagagcatgatctttataaatattatatactgcaggattctaaagattataaacctgaaaagccatcggatactgagttagtattcattagcaacgctgaaacaattagagattatttgttgcggttatctgttgatgagttgaagttgcttgctaaatnnannnngcaaaatgtatatatcgtatttgtgcaaacagatgatttcgcatcatcatttagactctttaatgtattaaatagtcgaggtttacctttaagtaatgcagatcttttaaaaaatgcactgtttgaatcagcttctacacataataaaaaatcagagcaaatagaatcagcatggtcgcaaattgaagatatggtcggagtgagacggcttgataaatttcttactcttcataagctttccgagaaaaaagatcgtgacagggtgttacaaaaaggttttgaagcttttattgaaaatctccagcagcaatttgatggagatgctattgctatgtcactgatgttggttaattctgtaaaaaattatactaagattttagagaatgattttgaacacccttcaatacgacgaaaaatagcatcgctaagtaatttaggggtagatgagtggattcctccggttatggcattcatgaatcgaatggctcgtacagaagattttaatttagatgatttttctcaatttattaccgcctttgagaaggtatatatgcatgggtggttaaaaaaacaaattaaaagccaaagagaaatggtttgttattcagctctggtagcaataaataatgatatgccttttgattctgtgataaatcagataaaccaacatgcagataattcaggttttatagctgctctggatgaagatttatatgagcctcgtccgaatcaagtgaacttaataaaagcaattttgcttcgcttagatatggagcaacaagatgagagcgtgattaaaacctatacggggagaatcacaattgagcatattcttcctcaagcattagttaatgaatactggattaatagattccaacctcaagagcatgtctactggctgcataaaataggtaatttaacactcataagtggttccaaaaattctgaagcacaacactatgattttatcaaaaagaaatctatttatgagaaacttaatagtaaaagctcttttgatttaacaaaagatgtttgtaattcttcagaatggggattggctgaactgaaaatgagacatgaaaaaatgaaaacgcaattgaagaagctttggttggtctgacatatctaaagagttccactcgtaataatgttgcggtggaactctcaaaaagttgatctttcccgaacttacttcctcaaccccgcaaacgctgcccgaatctcttcctccggcaactgaatcccgataaaaaccattgtgctatgcggtttttcatcgccccacgggcggtcccagtcggcgctgtagaggcgctggacgccctggaacagcaggcggttaggttcgccgtcaatccacagcatccctttgtaacgcagcagtttatccgccgattccagcagcaggttttccatcacgcgggaaacttcgctgatatctaccgggtaatccagttctaccacaatcgacgaaatatcgttttgtttatccgcgataaagtggaaacgcggtttggtgctgacgacgttttcttccagcataaaaccgttggtgttgaacagcaggcccaggtcgatgtcgccgtgggtaacggtgtagaccggtgcacgggcgttgatgcgcgccaggcgttcgcgcagtttttctgcttcgcctgcgacgtcggttttggtcagcagaatacggtcggcgtagccaacctgggactgggcgatggtgaactggttcatctgctcatcggcatgtaccgcatccaccagcgcaatcacgccgtccagcaggtaacgctggcataaaatctcatgggagaaaaaggtctgaataatcgggccgggatcggccatgccggtgcattcaatgaccagacgatcgaactgaatattgcccttatcgagattatccagcaggtcgagtagtgcgtcttccagctcgttggagcgcgaacagcagatgcagccgttggtcagcgttttgatctgcgtggcgcggtcgccaatcagttgatcatcaacggagacttcgccaaattcgttttcaatcacggcaatcttgtagccgtgttgttcgttaagaatatggcgcagcagggtggttttgcccgcgcctaaaaaaccggtgagtagggtaactgcaatcgggttcatgctctctccattaacaacagcgcataccgcctttaccatcgccgccgtagcgcgcgttctggcgttcgcggaagaattcttcatagctcatgtacggcttgtcgggatggttggtcttcatatgctcgacgtagttgtcgtagtctggaatgccaatcaacatcttcgccgcctggccgagatatttttttgcctgtcctaagttaccaaacatagttcactctgataagaacaaagccccgccgaagcggggctaaacacggttagtggtgcgaagagatcttcacgccgccttccgggattggaacgtacggtgtttctttgtcagtacgtttgtcgctgttacgtaccgcaagccaggttttgaaaccgtagaagatgatgctgtacaccacaatcaggaacagaatactcaggcctgcgttggtgtagttgttcacaacgatgtggttcatgttggcaatctgctgcgccgtaaggtcagtaccgttagcaatcttctctttgtactggcttgccatgtagaagaagccttccatctgcgggttggtgctgaacagtttcagacccagcgcccaggtggtgcagataagcagccatacagccggaacaacagttacccagatgtattgggtgcgcttcatcttaatcagcacaacggtgcccagtaccagcgctacggctgccagcatctggttggagataccgaacagcggccacaggctcttaacgccgcccagcggatcgaccacgccctgatacagcaggtagccccacagacccacacagcccgcagtaccgatgataccagcaaccagagagtcggtttttttcaggaacgggatgaagttacccagcaggtcttgcagcataaagcggccagaacgggtacccgcatccagcgcggtcaggatgaacagggcttcgaacagaataccgaagtgataccagaagcccatgtcagccatcggcagcactttgtggaacacatgagcgatacctaccgccagcgtcggcgcaccacctgcacggttcaggacagaaggctcaccaatgtctttcgcggtttgcaggatctgctctggcgaaatcacgaagccccaagagctgacggtcgctgccgcgtgtgcggtaacgtctttcagctgcgccatgatgatcggcgcgttctcgccacccatttcatgcaggttaggcatggtgatgccaaggcccgcgggcggggtgttcatcgcgaagtaaagacccggttcgatgatggatgcagcaaccagcgccataatcgccacgaaggactccatcagcattgcgccgtagccgatgaaacgcgcgtcggtttcgttagccagcagtttcggcgtcgtaccggaagagatcagcgcgtggaagccagataccgcaccacaggcgatggtgatgaacaggaacgggaacagagcgcctttccacagcgggccagtaccgtcaatgtactgggtcatcgcaggcattttcagttccgggttcagcaccacgatacccagcgccaggccgacgataacgccgatcttcaggaaggttgccagatagtcgcgtggtgcgaggatcagccacaccggcagcagcgcggaaacaaacgcatagccaatcagcgcgaaggtaatggtggtgtctttaaaggtcagtgccggaccccagtacggatcgtgagcaatcacgccaccgaagtagatagaggcaaccagcagcacgataccaataacagagacttcacccacacgccccggacggataaagcgcatgtagatacccataaacagcgcaattggtacggttgagcaaacggtgaagacaccccacggactttctgccagggctttaaccacaatcagcgccaggacggcgaggatgatgatcatgattaagaaacagccaaacagcgcgatagtccccggtactggccccatctcttctttgatcatctcaccgagagatgcgccgttacggcgagaggagataaacagcaccataaagtcctgaaccgcaccggccagcactacccccgccagcagccacagcgtgccaggcaggtagcccatctgcgcggcgagaaccggtcccaccagcggaccagcaccggcgatagcggcgaagtggtgaccaaacaacacgtaacggttggtcggaacgtagttcagaccgtcgttgttaataaccgcaggcgtcgcncgcgtggggtcgagtttcatcaccttctgggcgatgtacagactgtagtagcgatacgccaccagatacaccgacacagaggcgaccacgatccacagggcgctgacgtgctccccccgacgtaatgcaactaccgcgaggcagaatgcaccgatgattccgagaatcacccagggtatgtgcttgaatagttttttcgtatccatagtaaaacctggcatgtattgattaatagttggccgaagccgttctaggtttgcgttgcgtttgaggaggtaaattgaccgctatcctgcaatgatgctgccagagttacgcgcgcgtaaagtaaggtaaataactgagtggttattttagggacgtaagcggtcagttttgcggttgagcggttttgagcaaggtttatgaaggttatttatgtgatgatgatcacaaccgaagcgatttttagccctcggttgtgtaactcatttaaaaattatattcatgctataaatattaaataacaatatagcaatatggtgtgttatttatttctttaagtaaaacgtgttttttacgagatttagtaagataaaatttctcatctaaatagcaatcgatgagagagtccagcctttccctgtctatcataggggtgatacccaaggtccagaaactgcgtaaatcgagttcggaacgttttatttttgcgcttttttctaagtctgcgatcatatttttaacacaactggtcgcgtctctgttttgttttatttcaagcgcgatatagctatcttgtgcccagccttttttacgtagtaagaaatctgtgcgtagtgtcgggcgctcaggttttttgcgcatatcacaggaaagtgcttgttcacgccaccattcatggtctgttgagcagagcatattagcaaactctacctggaaccacacttcccaaccggtgatattgttttggtcaataatattaagcttttggcaaatatcctcacgttcaaaaaagagatgtaatagcgttgagagatgatcgaagtcacggtttaacatttcagatgtcctttcttaaaattccacactctataaaatatttcgttcaaaatagatacaattcgtgtgaaaaaaataagaaaagaaaatgtatcaataagtggttattgtatttttgaacaaaaattaaaaaaagtgaggtaaaatcaaccagtttcaagtcgctacctataaagttttctcatttcaggccgaaaattttgcatcggtccacaggaaagagaaaccatgttaaaacgtatcaagatcgtgaccagcttactgctggttttggccgtttttggccttttacaactgacatcaggcggtctgttctttaatgccttaaagaatgacaaagaaaatttcactgttttacaaaccattcgccagcagcaatccacgctgaatggcagctgggtcgcgttgttgcagacgcgtaacaccctcaaccgcgcgggtatccgctacatgatggatcagaataatattggtagcggttcaaccgttgctgagctgatgcagagtgccagtatttcgttgaaacaggcggaaaaaaactgggcagattacgaagcgttgccgcgtgacccgcgtcagagcaccgccgcagcggcagagatcaaacgtaattacgatatttatcacaatgcgctggcggagctgatccaactgttaggtgcaggcaaaatcaacgagttctttgatcagccgacccagggatatcaggacggtttcgagaagcagtatgtggcttacatggagcaaaacgatcggctctatgatatcgccgtcagcgataacaatgcctcctacagccaggcgatgtggattctggtgggcgtgatgatcgtcgtactggcggtcatcttcgccgtctggttcggtattaaagcctcgctggtagcgccaatgaatcgcctgattgacagcattcgtcatattgcaggcggcgatctggtgaaaccgattgaggtggatggctctaatgagatggggcaactggcagagagtttgcgccatatgcagggagagctgatgcgtaccgtcggtgatgtgcgcaacggggccaatgccatctatagcggtgccagcgaaatcgctaccggcaataacgatctctnttcgcgcaccgagcaacaggccgcttcgctggaagagacggcagccagcatggagcaactcaccgcaacggtgaaacagaacgccgagaatgcgcgccaggccagccacctggcgttaagtgcttctgaaacggcgcaacgcggcggcaaagtggtagataacgtggtgcagactatgcgtgatatctccaccagttcgcagaaaatcgccgatattatcagcgtaattgacggcattgccttccagaccaatattctggctttgaacgcggcggttgaagcagcgcgtgcgggtgagcaaggacgtggttttgcggtggttgcgggagaagtgcgtaatctggcccagcgtagcgcccaggcggctcgtgaaattaaaagcctgattgaagantcggtggggaaagtggatgttggctctacgctggtcgaaagcgccggggaaacaatggcggagattgtcagtgctgtgacccgcgtgacggacattatgggcgaaatagcttctgcttctgatgagcagagccgtggtatcgatcaggttggcttagcggttgctgagatggaccgggtaactcaacagaacgctgcgctggtggaagagtctgccgctgccgccgccgcgttggaagagcaggccagtcgcctgaccgaagctgtggcagtgttccggattcagcaacagcagcaacagcagcgtgaaacatcggctgtggtaaaaaccgtgacgccagctacgccgcgtaaaatggcagtggcagatagcggggagaactgggaaacgttttaatcgccataaaaatgcccgataagcaaaatgttatcgggcatagggagtttaatctttacgcgggtcgttgatcggctgacgaaccaggaagatgtacgccagtgctcccgctgcggtgacgcaaccgcaaatgattagtgccagacggaatgagtgggttgtatcaacaataaaaccagtaatgatcggcgcgaaagaggcgcagatgaagctggcaaagttctggatactgcccaccgacgcagtcatgcgagaagcaactgcgacgtggatcaagccccagcaggatgttccggcaaagtgaatacagaacagtgccatgccaatcagcagaaccgccatcatggatgttgtcgcttgtggtactatcagcgtaaaggcggcagaacagaacatcccggcaataatgcagatcttacggcttttaatcggagccattccccctttgaccagccagtcagtaacgtaaccgttgaccagcatcccggcagcaccaaacaggaaagggatagccgccatcaaccctgtgctttttaaatccaggttataggctgtttgcaggtaaccaggaagccaggccagatacagccacgcagtgtagttgatgccactgaatccgagcatcattccccacattgtgcggttacggaacaggctgcgccattcggcaaaactgagcggatctcggcgggcattgacgctacctgcattgagataagcttgttcaacggcagtcagttctacgtgctcgcggttgcgatagagcatataccagccgatggcgagaaaaatccccagtacaccaatggtaataaacatcccgcgccagcccatcaccagcatcatcgccgccagaatcggtgggcttacggcaacgccaatggtagaagctgcgttgaagaagcccatcgggcgtccgcgctctttgatgttgaaccagtcgttaatgacttttacaccgcatgggttcatcggcgcttcaccaatccccataccgatacgcaccaacacgaactgcgtaaagctgtgcaccatgccagacatggcctggaacagtgaccagaagaacatccccagtcccagcatcaggcgtgggcctttacgatccaatagtgggccgcaaggaagttgcgcaatgccgtaagcgagtgaaaacacggagagcaaagcgccgatttcggtggcacttaatcccaattcttcacgaatcgttaaatttgctaccgacagcgaactgcggtcgagataattgattaccgccgcaaaaaataataacaacatggcggtggtttgaatgcgtttaattcgggtactgcgttgaactaatccatctggtggcacgggaatatctgccgacgaagatggagtaaatgaagaacgcggatcgagggtgatattttctttttccacgccggactcctgtatttataatttnaattgtttacgtaattgtgcattacgcaaggttgacattaacggcaggttaaagttttaggactttactaccgctcacaaaaacatttttagtcgactgattgtgagcataggtaagcgggaatttcccggtatttatcttttgataaaaccgtgcacccgctaatagtttgctgtttttaatccgtacttaatgagcataacgcgtgttctcattaatggatcgaatcattgattgtttcgctgaattcaaatggttacggagcgcaagggtggcatcaaggtcactgcggcaaatcagagcgctgagaatggtcatatgctcatcgacggcaatgatattgcgctgtttaagatcgctttcgtcccattgatagtgaaaatgaaagatgactgagatgatctcaagcgattgatcaaaaaagatattgtcggcagctgaaagcagtaaggagtgaaaatctctgtcaagttgcgagaacatgcgaaagctattgccgatgttgtcacgcagtagccgatgacgttcgagcatggttttcgcctgcagccagcggggatcatgatcaggcaggttgagaaagtgctgaagtgaatgtgtttcgagcatttcgcgtagctcaaacagctgctcagcgtaggattgatcgaattgcttcatgctccactggccgcgcttttcgctttgaataagattataacggccgaattttaaaagatattctcttacaaccaccgggctgacacccncggcccgagccagttgcagttcagaaaaagtttcccctgggcgtaactggcgctggtttatcatcgtgaaaaaagcctgctcaaacactttgttttgttcactcattgaagcggtagtacaggcgaaaccgtcatcatggtcaggtttacgcgcaataacatagtcgtttccaacctgcgttaagacgccgcattcgcgtaagtggctgagaatatgacgcactgtagtgcggctgatgttgtacatttccgccagcgcactttgcgatggaagtggggaagggatatgaccccgcgccatatcatcaatgacctggttaatcacattgtggcgtaaattttgtgaacgactcatattttcctccttgtgagtccattaaaacccgatttaaaacatttttatgcgtgtgttttcacaaaacagattttccgttccgctgccatttttcattttcattgatatctaaggcaacaaaaaatggagagccgaatcatgtctacgatgaatgttttaatttgccagcagccgaaagaattagtctggaaacaacgcgagatacctattccgggtgacaatgaagcattaataaaaattaagtctgtcgggatttgcggtaccgatattcatgcctggggtggaaatcaaccattttttagttatccacgggttttaggccatgaaatatgtggggagattgttgggctgggtaaaaatattgctgatcttaaaaatggtcagcaagttgctgtgatcccttatgttgcctgtcagcaatgcccggcgtgtaaaagcgggcgtaccaattgctgtgaaaaaatttcagtcattggcgtgcatcaggatggcggttttagtgagtatttgagcgtgccggtggcgaacattttgcccgcagacggtattgacccgcaggcggccgcattgattgaacctttcgctattagcgctcatgcggtgcgtcgcgcagccattgctcccggcgagcaggtgctggtggtcggggccgggccaatcggtctgggcgcggcggcaatcgctaaagccgatggcgcacaggtggtggtggcggataccagtccggcgcgccgtgaacatgtggcaacgcgtctggagttgcccgtgctggacccgtcagccgaagattttgacgcgcagctgcgggcgcagtttggtggttcgctggcgcagaaagtgatcgacgcgacaggtaatcaacatgcgatgaataacaccgtgaatctgattcgtcacggcggcacggtggtatttgtcggcctgtttaaaggtgagttgcagttctccgatccggaattccataaaaaagaaacgacgatgatgggcagccgcaacgccacgccggaagattttgctaaagtcggtcgactgatggcggaaggaaaaatcactgctggcatgatgttaacccatcgctatccgttcgccacgctggcagaaacctacgagcgcgatgtgattaacaatcgtgagttaattaaaggcgtaattactttctgaaaggcgagattattaaagttgccatgcagcgtccggggaagtgttgggcgctgttttttttgtttcttaataatgtgttgtaagccggagaaggtgtgtaggtcncacccnatgcgacctacacatcagtcaggaattacccttcacgttctaccactttaatttccaccatgccgatcccgagcttacgcggcgagtgtccgaggatattcccttcgttggttgagacaggttccggcggcacaattaccagtgtgtcggcatcggttgggttatcgaaatgcagtgtggtggtggtcacttcattgcccagcacaagagtttgttcttcattgcctacgcgtaccggaataggacggctggcgttattgccgtatgctttggcggtaatcaccaggtcaaatttcttcggcagcggatgcttgtactcgatttttacttcatcgcccagctgcgcgttggaccagcggccccacgactccggacgggaaatcccgctaaactgtttcacctcttctggcgcaccggcgacgttaaagatgaaactgtcggctttgtagcgaatatcgttatcaacaatcttcagcgtatcgacattgcctttgtaacgcgccatgtcgatgaccgtatctttaaatgccgtcttgctcttccatgttgttttgtcaacatgctgaacaatttgctgaccgccaagttgcccctgcgagacacaccagtcggtggaaagtgccagttccggagcccagagttgtgccatcttgtagcaacggtcaacccagacgaaattgtcgcgtggagcgaaatcggccagctggaaacgcagcggtgctgagtattcgctttctggcagcggttccacgcgtttgtctgaaacccgcaacagcagcggcaaacggaaatggctacccgagaaggcaatcatgtttttctgctggtcgatggtgaactctttcatctctttagggaatttccacagacggatgatatccggcttccacgccaatgttttctctttgatattgaggaagatttccgacattgactgcccggataaactgctacgaccaagtccgagatagttatcgccaccgagaatgtccagcaccgtcgctccgttatccatcgtgttacgcttcactgccagcgtctcttgctgcggcttgtcgccacgaatgacaaaaaacaggttattgcgatcctgcttattgaggtatttccacgccgtgttgttcatcgctaaatggtcagaagagacgacgatgacagtatctttaaaccacggtgacgctttgattttgttgataaacgtcgcgatattctcctggctgcaacttaccgcgctgaatgactgattcggtttaccgtcaaaatcatattttttgcggttacaggtacgagagataaaaccatccgggtgatgggtatcgactgtcagggtaaacagtgagaatcgctgacctgagcgggaaagctcttcaaactttttccacgcttcatcgagaacggtatcgtcgtagaatccccagtcgttgcgatagtgcgggtcggctaccacgcttttcagctcttctgagccgtataagtggtcgaagccatgcgacttcaggaacacatctttaccggcaaaacgcagattcgcgccctgcacgaaatagttctgataacccgagtttttcaggatatcgcccagacagatgttctgcgggaagaagctggaaacagaagcggaggcgttgccttcaaagggggcaaacagcggtatgccgcactgagaagccaccatgcccgcaatcgtgtaatctgttcccggcagctgctgcgtgtggctgaaatccaggccttcatttttcaacgcgcccagttcaggcgtgaggtccgggaaagcctcgttatcaaaataggtccgctcgagactttcgccgtagatataaaccaggttgagtttcgggtcagggatagttttcgacggctctttataataagccgcaaagtccgggtcgccgtcgcgtgactgggatttcaccagttccgttatctgacgaaatgccgggctggcgtccaccgaacccagcgccagtaagagcgccagcaggctgtaaccaaaatggtgcggatgatggcgacgacggcgcaggatccagcccagcgcaccgaacaccgctgtcagccccagcacaatgccgatacccggcaaaatgtatttgctgacgccagcaccggtcaggctgttggttaaggtatagagaaccgcgtcgttaataccatcgccagtaaaatagtcgctggcaaacagggtgatatttaaaacgacaaatagccccagcaccgttaatgtggctgcaaaccaccaggtgttacgtcccgctttccatgcgtaaatcagcacagaggcgagaaaaagggcgaaagagagtagttctgacaacgggcgatcctcactaaaccgggccgtttagccaacgtttaagctttttgagaagcacaatgtaatggcgtcgccatattgctgcaattctagtgtcaaaaaaatgcgatgttgttaggaattagtttataaacagacttttttgatcgcggtcgcttcccgtgtaacagggggaaaaccgtccaggagcagggaaaagggcaggagagagccgcgtcagccgggtaacagctaaaacgcggcgtttcgcggttcaggaaatgaagttcagcccctgctttaacaccagatcgcaggctttggttttcaccttttctgccagcggagttgttccgatgttatccagattgagttgctgaccatctttggttttcagcaaaccctgaatgccgtccagatagttggtgtcttctttttgctcttcactgttcaggcccagcttttccagcacctggttcttgatgttttcgacatcggttaccgaagccagcttttgcttcgcgcagtattgcagaatgcctgcggcattgttcatgttatctgcgcttaaggcctggtttccgctgctaagcaagttagttaatgacgcgagcgaccaaccgccttcctgtgtcgtgctgttttggttgccaagttcgctggcggcgctggagagcgcatctttccaggacgcagcatgcaccccggtggaaattaatgcgctggcggcaatggcacagcacagaagatgtttaacagttttcatcatcattactcaaggtggaattgtgtcgcagtataccgccagaaacggggattaatactctttacctgttacacggctacggtagctatcccagttgaagatcacccacaaactgttacccaggcgcatacggtccatcacgcgttcgcccagcaacttggtcatctcttccatattactgttggtcagcatcccggttgggcgtttggaagaagagcggcgatcgacgatctggttgatgatcactttttcgtatttcgattcggtctgcacgccgatctcatcgatcaccagcagatcaacgttgctcagatcgttaagcagttgttcttcgctggtaccgctattcctgaaggtatctttcatcgccgacataatatcggccacggtgatgatcaatacggatttaccgcgtagcagcagctcgttgcagattgccgccgccagatggtttttgccggttcctggcttaccagaaaagatgaagctggcgatgttgccgtcaaactcttcgacatactggcgcgctttgcttaacgcattcatctgcccttcacactcaacgcgatagttctcaaaggagcagttctgatgcagtggacgaataccggagcggttaaaggtgcgctgcattttcatcgcccgattttcacgttcgagagcggcggagcggatcgccccttgttctttctgccaggccagtagctcttcacccgttttgaatgcaggtttgatatgggcaggcatcattttttgcaggcgttgcatcaggtcgccaacgtttttcatcgttaccctctgaatcctggtggaatttggctgtcaggttcactgaccgtattcacatctcgtttcggcagtccgccgttgctggcacgaccgatttgcaggctgcgcgccagtttttgttgccactgcacatggtgaaagactttaccttccgcctgccagtaggcaatgaatgaggccagttcttcggtggttaccggctctcttagcgccacgccccatagagccgccaggcggataaagtcggcatcgggttgccagtccggatacatggcgaatttccccatgggtacagcaacgggagcggcttgcggttcctgatagagttgatcgtccagatcgacatcgcttcccggacgcgccagcttttcttccagcgccagcagttcagccaggcgtgcaggcgtgacggcataaaacgccggggcattgttagcaaatacggcaaccacaccgccttcagcttttgccagaacggtttggtgatcgtgtaccagggcgtcaataccaacgacgtccggggtcaaaactctggaagacatactgtttctcaaatatggaacgatgaacgagaagggagataacttttatagtaacacacggaggagaggaggctgtctctcatccgtgtgcttaagcgaggcaattttatacgcgagggcgcttgcggtacaaccataatccaggaatggaaagaccgatggataacgcaccaacaatcgatgaagctgtaagaaagttggttaacagggtaatcatcaacggttcgctgtaacctaactggctgatttttaccgccgaaatcattgcggtataagccgatatgcccgggaacatagggataacggccgccacggtaaacactttcggatgcgccagataccagcgcgaccattgaataccaatggtgccgaccagcatggaggccataaaggttgaccactcaatattcaacccgctggtcatcaagatcattcgggaaccatgacctatcgagccaagcagcgcacaccagcgtaacgcccgcacgggaacgttgaacaccatcgcaaagccgaccgcaggaatggcggcgaggatcatatcctgcgccaacgctaacagaaattcgatcacacccatccgcgtagcccccaaatcgtcagtgccatcactacgccgacgcaggtagccagtgtcagcagactggcgatcgcccagcgtgccagtccggtattgatgtggcctttaaacatatcggcgacggcattaatcaacggaaagcccggcactagcagcagaacgctggcggccatcgcaatggtgggggtattgctgaaagtggggagttgcaaaagcaatccggaaatggtggtggcggcgaaagcggtaaggcaaaagttgatctgtggatgaagatgacgttgtgccagcagctggcggatatacatcgcggtcgtactggcaaagaaggtgatgacggcgccatcccagccaccgttattgagtttacagaaacaggcgcaagaaaggccaaccattaaggctaccagccatcttgggtaacgtaatggctgaatttggctaaatcgtttctctacgcctttgtaatccagcagatgatgctccgcaagaatcacaatgtgctggacttcagtcaccacatgcatattaatgccgcgatcgtgatttttacgtgtcgatgtcaggcattgcccatctttaatagttgtcagcactatggcgttcgaagagatagaactttcgacgctgtccattcccagcgcccgacccagtcgtgaggaaagctcatcaaccaacgcgctttccgcaccatgttgcaaaagaaataatccacactggatacaaagccgtgttacggctcgctgttgctcagtttgcataactcgccctttgtcatagacgtgctgcgtattgttcagataatgagaatccatttgtatcatgaagcaaggttgttttgcggtaggttaagatcaaaattgcgctgattaatcctggttatcgggacaagctcggtgataaaaagcgaattatctctcgccgcaaacaaactatcacatgaatattatcactataatgaatttattgttttagcctttacgggtcaggataatagatagctgggcgcgttttttagtgttaacaagttaaaatcatcagattttattgaataaatattgattgtgtgattcccgcattctgcgggaagagatatcatttaattataaattaaatgaatgagatttctgtttttcattaagtatttctaacaacttaatgtagatattttaaatgtctccaggctatttcaccaggttatcatttgatgctaaccttctgacacatgcagtggagttgttgtgcagcaggagtatgctgatatgaaagtgaatgctaaggataatttattcgcttaatctattaatttgctggaaacatttaaggaatgaatatcctgaataaaccatcataatttttagacagtggatgtggaggaaatatgttgccaggatgctgcaaaaatggaatttttatcagtaaaataccggttatgcaagcagggttaaaagaggtcatgaggactcacttccctgaatatgaaataatatccagcgcctctgcggaggaccttaccttattacaattacgtcgttccggattagtcattgctgatttagccggtgaaagtgaagatccacgttctgtttgtgaacattattattctttaatctcacaatatcgggaaattcactgggttttcatggtgtcacgctcttggtattcccaggctgtagaactgctcatgtgccctacggcgacgttattgtctgatgttgaacccattgagaatctggtcaagaccgtacgttccggcaatacgcacgcagagcgtatcagcgccatgctgacctctccggcaatgactgaaactcatgattttagctatcgctccgtcattctcactctttcagagcgcaaggtactgcggctattaggtaaaggatggggcatcaaccagatagcttcattgcttaagaaaagtaataaaactatcagcgcccaaaaaaacagtgcgatgcgtcgactggcaattcacagcaacgctgaaatgtatgcatggataaatagcgcgcagggtgcaagagaacttaacttgccttctgtttatggagatgccgcagaatggaacacagccgaattaagaagagaaatgtcgcactcatagaaaaatgcgtcatgagtagtatcggtattgagagtttattcagaaagtttgcgggcaacccttataagctccatacctataccagtcaggagtcatttcaggatgccatgtcgcggatctcgtttgcggcggtcattttttctttttctgccatgagaagtgagcgcagagagggattatcttgcctgactgaactggcgattaagtttccgcgtacccggcgtttagttattgcggatgatgatattgaagctcggctgattggttcattgtcgccatcaccgctggacggtgtattaagtaaagcgtcaacgctggagatttttcatcaggaactctttttgtcattaaatggtgtacgtcaggcgaccgaccgactgaacaatcagtggtacattaaccaaagccggacgttaagcccgacggagagagaaatattgcgctttatgtcgcgtggctactcaatgacacaaattgccgagcagcttaaacgcaatatcaaaacgatccgtgcacataaatttaatgtgatgtcgaaactgggcgtcagttctgacgcagggttgttggaggccgcagatattctgttatgtatgcggcattgcgaaacaagtaatgtgttgcatccctattaatccgcatgatgccgggtttacttccccggcagtgctttcatttcagcgtacaatcgccacattgctgtacatccggtaagcgataacgctggcagcaagtgcggcgcaccagcaggccgtcgcgtagcaccacggtacgccagagtggattatcttcaccggtagtaagcgttttctcaaaaaagagggcatggcgcagcgattcaaccgtcgcctcgccgagcagttgcttcatctcagtaagataccagttgatcaaataaccggtattactccagataagtttgccgttgatctctccggtcgcttctagtgcctgcacaaccggaaccagcgcctggctgattaacgtttccattcgctgctgcggcgaatgtggtgttgcgtttttatcttcacacacatcgacccagaaacaggcgacgcgtccggtttcgtgaaactcagcatggaaatgttccggcgacacatctaatgctttttcctgcgtcagtagcgccagcattaatggtggcaccatcaggccgatataccattgtgcccatagtgagatcagcggtttgtactcgcggatcatcgttggttggttgcgatagatatgatcggaatagaccgccagtagagaacttagcgcattcggtgatgaccattgcgccagcgtcatggcgttaagcggagcgggttcatccaggcggataaactccagcaaatgttcacgatgttcggcgatcgtcgcacgtacggcttgtgcaagcctagcatcctgtggctggagatgcgttcgccagatgatatcttcatagagcggtgcggaacgataggccataatcgggatagtaatctaaatgataatgattgctaatcctagcgataggtttacccgatagcaagggatttctctggcttgcaaatgataaaaannnncatatgatattggttatcattatcaatgaaagagataaaaccatgttgcaacgtacgctgggcagtggctggggagtgttgctgccgggatttctgattgcagggctgatgtatgcggatttatcgccggatcagtggcggattgtcattctgatgggattagtattgacgccggtgatgctgtatcacaaacagttgcggcattacattttgctaccatcgtgcctggcgcttattgctggcatcatgctgatgataatgaatttgaatcagggatgaaaaacnngagagaacaagaaaggaagtaaagataattggtgcgaggggggggacttgaacccccacgtccgtaaggacactaacacctgaagctagcgcgtctaccaattccgccaccttcgcataccatcaattcttaaaaagaattgctaccacggaggcgcattctagtggttttcagcttttcgtcaatagttaattatcgcctgatgtgtaattgctggaaaaatgtccatcaggagactaacgtgcaggttttgtaagtcggataaggcgttcacgccgcatccgacacggtattcggcgagataattaacctttcttcgcctggcgggtcataatggcgcgatacaccttgaagcgccctgtttgcgcgatcacttcgtggaagccaaatgtctcatccagcacgtccggataaggcaggaaggcgttcgctacaattcgcagctcgccgccgctattaagatgacgcaccgcaccgcgaatcagcgtttgcgccgcatccaggctggtttgcatcccatcgtggaacggcgggttggagatgatcatatcaaaacgacctttcacctcggaaaagacgttgctggcaaagacttcaccttcaacaccgttggccgcaagtgttgcgcggctggcttctaccgctggcgcagagacatcgcacaaggtgagacgaattttcggcgaatggcgcgcaaaggcaaccgaaagcacgcccgcgccacagccgacatccagcactttacctttcgtgtgcggggttaacgtcgagagcagcaactggctaccgacatccagaccgtcgcggctaaacacgccaggcagcgttttgaccgtcaggccatcgacgctgtattcgccccagaatttatcggcatcaaataccggctgtttttccagacgaccaaaatagaggccacagcgacgggcgctgtcgactttattcaacggcgcataatcagccagcatctgctcggcgctgcgcacgccgctgcggttctcgccaacaacaaaaatatccgtccccaccggaagcagagaaagtaaattcatcaactggaactgggcttccggtttgttcttcggccagtagtaaatcagcgtatcgcaatctgcgacatcatccgccgtggcgaccagactaaaacgggcgttatcccccatctggcggcttaacacctgccaatggtggaattgctgggtatgagcacggctggccgcggtatctaaacgcgcgggcaggtcatcctgtaagtctccggcaaacagaatacggctttgttcgaaatcatcactgtgacgcagcaagacttcacttgccggggtaaatgcagacatggaatgctcctcaattgatactggcggcgattatagccatatgttggcgcggtatcgacgaatttgctatatttgcgcccctgacaacaggagcgattcgctatgacatcccgacgagactggcagttacagcaactgggcattacccagtggtcgctgcgtcgccctggcgcgttgcagggggagattgccattgcgatcccggcacacgtccgtctggtgatggtggcaaacgatcttcccgccctgactgatcctttagtgagcgatgttctgcgcgcattaaccgtcagccccgatcaagtgctgcaactgacgccagaaaaaatcgcgatgctgccgcaaggcagtcgctgcaacagctggcggttgggtactgacgaaccgctatcactggaaggcgctcaggtggcatcaccggcgctcaccgaattacgggcaaacccaacggcacgcgccgcgttatggcaacaaatttgcacatatgaacacgatttcttccctcgaaacgactgatttaccagcggcttaccacattgaacaacgcgcccacgcctttccgtggagtgaaaaaacctttgccagcaaccagggcgagcgttatctcaactttcagttaacgcaaaacggcaaaatggcggcgtttgcgattacgcaagtggtgctggatgaagctacattgttcaatattgcggtcgatcctgactatcagcgtcagggattgggaagggcgctgctggaacatctgatcgacgaactggaaaaacgcggcgtggcgacactatggctggaagtccgtgcctcaaatgctgccgccattgccctgtacgaaagtttaggctttaacgaggcgacgattcgccgcaattactaccccaccacggacggtcgcgaagacgccatcatcatggcgttgccaatcagtatgtaagacaaggtggaataatgaagtgggactggattttctttgatgccgatgaaacgctgtttacctttgactcattcaccggcctgcagcggatgtttcttgattacagcgtcacctttaccgctgaagattttcaggactatcaggccgttaacaagccactgtgggtggattatcaaaacggcgcgatcacttcattacagcttcagcacgggcggtttgagagctgggccgaacggctgaacgtcgagccaggtaaactcaacgaagcctttattaatgcgatggcggaaatctgcacgccgctgccgggcgcggtttctctgcttaacgccattcgtggcaacgccaaaatcggcatcatcaccaacggctttagtgccttgcaacaggtgcgtctggaacgcacgggcctgcgtgattacttcgatttgctggtgatttccgaagaagttggcgttgccaaaccgaataagaaaattttcgattatgcgctggaacaggcgggcaatcctgaccgttcacgcgtgctgatggttggcgacactgccgagtccgatattctcggtggcatcaacgccgggcttgtgacctgctggctgaatgcacaccatcgcgagcaaccagaaggcatcgcgcccacctggaccgtttcttcgttgcacgaactggagcagctcctgtgtaaacactgattgcctcccccccgttgatgggtaaaatagccgcaatttttcgttttcaacaagcgcggcgcgatgccgcttactcaagaagaaagaattatgacgttgtctccttatttgcaagaggtggcgaagcgccgcacttttgccattatttctcacccggacgccggtaagactaccatcaccgagaaggtgctgctgttcggacaggccattcagaccgccggtacagtaaaaggccgtggttccaaccagcacgctaagtcggactggatggagatggaaaagcagcgtgggatctccattactacgtctgtgatgcagtttccgtatcacgattgcctggttaacctgctcgacaccccggggcacgaagacttctcggaagatacctatcgtaccctgacggcggtggactgctgcctgatggttatcgacgccgcaaaaggtgttgaagatcgtacccgtaagctgatggaagttacccgtctgcgcgacacgccgatcctcacctttatgaacaaacttgaccgtgatatccgcgacccgatggaattgctcgatgaagttgagaacgagctgaaaattggctgcgcaccgatcacctggccaattggctgcggcaagctgtttaaaggcgtttaccacctttataaagatgaaacctatctctatcagagcggtaaagggcacaccattcaggaagtccgcattgttaaagggctgaataacccggatctcgatgctgcggttggtgaagatctggcacagcagctgcgtgacgaactggaactggtgaaaggcgcgtctaacgagttcgacaaagagctgttccttgcgggcgaaatcactccggtattcttcggtactgcgctgggtaacttcggcgttgatcatatgctggatggcctggtggagtgggcgcctgcgccgatgccgcgtcagaccgatacccgtaccgtagaagcgagcgaagataaatttaccggcttcgtatttaaaattcaggccaacatggacccgaaacaccgcgaccgcgtggcgtttatgcgtgtggtgtccggtaaatatgaaaaaggcatgaagctgcgccaggtgcgcactgcgaaagatgtggtgatctccgacgcgctgacctttatggcgggtgaccgttcgcacgttgaagaagcgtatccgggcgatatcctcggcctgcacaaccacggcaccattcagatcggcgacacctttacccagggtgagatgatgaagttcaccggtattccgaacttcgcaccagaactgttccgtcgtatccgcctgaaagatccgctgaagcaaaaacagctgctcaaagggctggtacagctttccgaagagggcgcggtgcaggtgttccgtccaatctccaacaacgatctgatcgttggtgcggttggtgtgctgcagtttgatgtggtggtagcgcgcctgaagagcgaatacaacgttgaagcagtgtatgagtcagtcaacgttgccactgcccgctgggtagaatgtgcagacgcgaagaaattcgaagagttcaagcgtaagaacgaaagccaactggcgcttgatggcggcgataacctcgcttacatcgctaccagcatggtcaacctgcgcctggcacaggaacgttatccggacgttcagttccaccagacccgcgagcattaattcttgcctccagggcgcggtagccgctgcgccctgtcaatttcccttccttattagccgcttacggaatgttcttaaaacattcacttttgcttatgttttcgctgatatcccgagcggtttcaaaattgtgatctatatttaacaaagtgatgacatttctgacggcgttaaataccgttcaatgcgtagatatcagtatctaaagccgtcgattgtcattctaccgatattaataactgattcagaggctgtaatggtcgttattcatcactcatcgcttttgtgatggcgaccattgacttctgtagagggtgaagtctctccctattcagcaatgcaacctcgtgttgccaggctcaaattacgagcaaacatacaggaataaatcgatgactatgacaagactgaagatttcgaaaactctgctggctgtaatgttgacctctgccgtcgcgaccggctctgcctacgcggaaaacaacgcgcagactaccaatgaaagcgcagggcaaaaagtcgatagctctatgaataaagtcggtaatttcatggatgacagcgccatcaccgcgaaagtgaaggcggcgctggtggatcatgacaacatcaagagcaccgatatctctgtcaaaaccgatcaaaaagtcgtgaccctgagcggtttcgttgaaagccaggcccaggccgaagaggcagtgaaagtggcgaaaggtgttgaaggggtgacctctgtcagcgacaaactgcacgttcgcgacgctaaagaaggctctgtgaagggctacgcgggtgacaccgccaccaccagtgaaatcaaagccaaattgctggcggacnnnntcgtcccttcccgtcatgtgaaagttgaaaccaccgatggcgtggttcagctctctggtaccgtagattctcaggcacaaagtgaccgtgctgaaagtatcgccaaagcggtagatggtgtgaaaagcg

SEQ ID NO: 1689 - DNA, 3652 bp, Escherichia coli
  Strain O55:H7
  modified_base (2254)..(2254): a, c, g or t
  modified_base (2257)..(2258): a, c, g or t
  modified_base (2288)..(2288): a, c, g or t
  modified_base (2291)..(2291): a, c, g or t
  modified_base (2355)..(2355): a, c, g or t
  modified_base (3262)..(3262): a, c, g or t
atgatctgaaaactaagtaattcgtcgtaattcgtcctcccgaactttgtcgggaggcgcgatgtgcaccacactaaaaatatcgcattgagtgattttcacgctcatatcaagcggtgacattaactatggtaaaggagacgcttatgtttcgttggggcatcatatttctggttatcgcgttaatcgccgccgcacttgggtttggtggtctggccggtaccgctgcaggcgcagctaaaattgtctttgtcgtcgggattattctgttcctggtgagtttgttcatgggccgaaaacgaccctagatttcagaccattaagaaaattttatccaaagccagtccagcggactggcttttgcggttttagcgaataataaattgcgttactttgtcattctttcacaacaaaaacaggaaggcagaggtggggcagcgaatacctgtaacgcttggtaatattgcgccgttgtcgctaaggccgttccagcctggacgaatagctctggtgtgcgaaggcggcggacagcgtggaattttcacggctggcgtgctggatgagtttatgcgcgcgcagtttaatcctttcgatctttatctcggcacatctgccggggcgcagaacctctcggcgtatatctgcaatcagcccggttacgcgcgcaaagtcatcatgcgctataccacaaaacgcgaatttttcgatccattgcgctttgtccgtggaggaaatcttatcgatctcgactggctggtggaggccaccgcaagccagatgccgttgcaaatggataccgccgcgcggttgtttgacagcggcaaatcgttttatatgtgcgcctgtcgtcaggatgactacgcgccgaattactttttaccaaccaaacaaaactggctggatgtgattcgcgcctccagtgcgatacctggcttttatcgtagcggagtgtcgctggaaggcattaactacctggatggcgggatcagtgatgcgattccggttaaagaggcggcaaggcagggcgctaaaacgttggtcgtcatccgcactgtgccgtcacaaatgtactacacgccgcagtggttcaaacgcatggaacgctggctgggtgacagtagcctgcagccgctggtcaatctggtgcagcatcatgaaaccagctatcgtgacattcagcaatttattgagaaaccaccgggcaagctgcggatattcgaaatttatccgccgaagccattacatagtatcgcgcttggcagtcggattccggcgctgcgtgaagactataaacttgggcgtttatgcggtcgttatttcctcgccacggttggcaagctattaactgaaaaagcgccgcttacccgccatctggtgccagtggtgacgccggaatcgattgtcattccgcctgcgccagtcgccaacgatacgctggttaccgaagtgagcgacgctccgcaggcgaacgacccgacatttaacaatgaggatctggcttgatttgccgttttatcgacacccactgccattttgatttcccgccttttattggcgatgaagaggccagcctgcaacgcgcggcacaagcgggcgtaggcaagatcattgttccggcaaccgaggcggaaaattttgcccgcgtgcaggcgttagcggaaaattatcaaccgctgtatgccgcattgggcttgcatcctggtatgttggaaaaacatagcgatgtgtctcttgatcagctacagcaggcgctggaaaggcgtccggcgaaggtggtggcggtgggggagatcggtctggatctcttcggcgacgatccgcaatttgagaggcagcagtggtttctcgacgaacaactgaaactggcgaaacgctacgatctgccggtgatcctgcattcacggcgcacacacgacaaactggcgatgcatcttaaacgccacgatttatcgcgcactggcgtggttcacggtttttccggcagcctgcaacaggccgagcggtttgtacagctgggctacaaaatcggcgtaggcggtactatcacctatccacgcgccagtaaaacccgcgttgtcatcgcaaaattaccgctggcatcgttgttgctggaaaccgacgcgccggatatgccgctcaacggttttcaggggcagcctaaccgcccggaacaggctgcgcgggtgtttgacgtgctttgcgagttgcgcccggaaccagaagatgagattgccgaagtgttgcttaataacangtnncggtgtttaacgttcgtgggtagtttgccnttngtaggcagcatccggcagtcggcgcataatgcctgatgcgacgcttaacgcgtcttatcatgcntacaggtttgtgccgaaccgtaggccggataaggcgttcacgccgcatccggcagttggcgcacaatgcctgatgcgacgcttgacgcgtcttatcaggcctacaagtctgtgccgaaccgtaggtcgtatccggcatgtcacaaatacagcgccggaaatattaaccggctcaccccgcgctcccgtaacgcatcagccaacggctcaacgtcttccggcgtggcgctcgcccagctttgcgcctcgccatacacgccgtgggcatgaaacgcgttcaggcgtaccggaacatcgccgactcccttgataaacgccgccagttcttcgatgtgttgcaaataatccacttggccagggattaccagcaaacgcagttccgccagcttaccgcgctctgccagcaaacagatgctgcgcttaatctgctgattatcgcgtccggttaattgctgatgacattcgctcccccacgctttgagatcgagcattgcgccgtcgcacaccgggagcaatttttcccagccggtttcgctcaacataccgttactgtccaccaggcaggtgaggtggcgcagttgcggatcgtttttgatagcagtaaacagcgccactacaaacggcagttgggtcgtggcttcgccgccactcaccgttatcccttcgataaacagcactgctttgcggacatggctaagcacctcatccacgctcatggattgcgccattggcgtggcatgttgcggacacctcttcaggcaggtatcacattgctcgcagaccacagcgttccacaccactttgccgtcaacaatctgcaacgcctgatgcggacactgtggcacgcactccccacagtcattgcaacgtcccatcgtccacggattgtgacagtttttgcagcgcanattgcagccctgcaaaaacagagccagacgactgcctggcccgtcaacgcaggagaaggggataatcttactgactaaagcgcatctgctgttcatggcttatcacgcgcggctggcgttccagaatacgagtgttgcgtgcggcttcttcgcccagccaggtggtgttggtgcgtgaaccttcggcgcgatatttttctaaatccgacaaacgcaccatataaccggtaacgcgaaccagatcgttaccgctgacattggcggtaaattcacgcattccggctttaaaggcaccgaggcaaagctgtaccaacgcctgcgggttacgtttgatggtttcgtcgagcgtcagaatgtcgctgatgccagaataataataagcatgatgcg

SEQ ID NO: 1690 - DNA, 6347 bp, Escherichia coli
  Strain O55:H7
  modified_base (9)..(9): a, c, g or t
  modified_base (323)..(323): a, c, g or t
  modified_base (2023)..(2025): a, c, g or t
  modified_base (2215)..(2215): a, c, g or t
  modified_base (5755)..(5755): a, c, g or t
agtttgcanatgggtgatcggatctggctcatcgccatacggcaaacgcgcgcccggcgtggtgccgatatcggaactgatccccgactgtgcgtgtaacatggcgcgtttttgccagccatatttcacgggggtattggcgacaaactccgccagctgtgcactgatgcgataacctacttcatttgcggcggcttctttaccgtagcgcgcggcaatcccttctttttcacacagcaagttaaccgcttccgccagcccatacatgccaaacattggcacaaaacgttcagggttaatcagcccttctttcaccaggaagntattctcaaagaagtgtgattgttgatagaggaattcacaccgcgcatcgatgatggcgatctgctgctggcagtagtgcggtagagtgcgcgtaaagaagtcatccagcgattcgctgcgctcggcaatggctttcaggttaaggcgtaccagcgtgctgccaccacccgccagcggcagtgagttgtaacagctcacaatcccgtagcccccttttgtgaaaattttatcatgcaccggaccgttggcgatgtgcggtttgctacattcacagatgttcttcgccacttccagcagcaggtcatcaggggtgatttcaggatcgtagataaaggtcaggttcggtgaaacctgcttcaaatctgcgtctgcacgtaagatcgcgcgggtaatgggcgaatcagacgggccgatattggcgtgcataaaggcgtctggcagggttctgtcgaggtaacgccagaaacgttttattcgaacatcgatctcgtcttgtgttagaattataacatacggttgcaacaacgcatccagttgccccaggtagaccggcatcgatgtgaccgacggtacgtggtggtaaagaatggtcagcagagagagtgcgtcatcaagatctttcgcgccttccagctccagccattcggaaccgttcgccagaaaacgggcgtaatcgggtaagacatagcgcggtttgtacggcgcatgaccttcaaacatatcgcagattacaccttcatccagcgcgcggcgggcttcggcaggaagctgtgggtaaggcagattgttttctgcttccagtgccagaaaatggcgcttctgctccgggctaagcactgggctggtgacaatttgctggcaacgttgttgcagtgcattttcatgagaagtgggcatcttcttttccttttatgccgaaggtgatgcgccattgtaagaagtttcgtgatgttcactttgatcctgatgcgtttgccaccactgacgcattcatttgaaagtgaattatttgaaccagatcgcattatagtgatgcaaacttgtaagtagatttccttaattgtgatgtatatcgaagtgtgttgcggagtagatgttagaatactaacaaactcgcaaggtgaattttattggcgacaagccaggagaatgaaatgactgatctgaaagcaagcagcctgcgtgcactgaaattgatggacctgaccaccctgaatgacgacgacaccgacgagaaagtaattgctctgtgtcatcaggccaaaactccggtcggcaataccgccgctatctgtatctatcctcgctttatcccgattgctcgcaaaacactgaaagagcagggcaccccggaaatccgtattgctacggtaaccaacttcccacacggtaacgacgacatcgaaatcgcgctggcagaaacccgtgcggcaatcgcctacggtgctgatgaagttgacgttgtgttcccgtaccgcgcgctgatggcgggtaacgagcaggttggttttgacctggtgaaagcctgtaaagaggcttgcgcggcagcgaatgtactgctgaaagtgatcatcgaaaccggcgaactgaaagacgaagcgctgatccgtaaagcgtctgaaatctccatcaaagcgggtgcggacttcatcaaaacctctaccggtaaagtggctgtgaacgcgacgccggaaagcgnnngcatcatgatggaagtgatccgtgatatgggcgtagaaaaaaccgttggtttcaaaccggcgggcggcgtgcgtactgcggaagatgcgcagaaatatctcgccatcgcagatgaactgttcggtgctgactgggctgatgcgcgtcactaccgctttggtgcttccagcctgctggcaagcctgctganagcgctgggtcacggcgacggtaagagcgccagcagctactaagtaagatgctttacgcctgatgcgctgcgcttatcaggcctacgagacgtatctacccgtaggccggataaggcgtagacgcatccggcaaaagccgcctcatactcttttcctcgggaggttaccttgtttctcgcacaagaaattattcgtaaaaaacgtgatggtcatgcgctgagcgatgaagaaattcgtttctttatcaacggtattcgcgacaacactatctccgaagggcagattgccgccctcgcgatgaccattttcttccacgatatgacaatgcctgagcgtgtctcgctgaccatggcgatgcgagattcaggaaccgttctcgactggaaaagcctgcatctgaatggcccgattgttgataaacactccaccggtggcgtcggcgatgtgacttcgctgatgttggggccgatggtcgcagcctgcggcggctatattccgatgatctctggtcgcggcctcggtcatactggcggtacgctcgacaaactggaatccatccctggcttcgacattttcccggatgacaaccgtttccgcgaaattattaaagacgtcggcgtggcgattatcggtcagaccagctcactggctccggcggataaacgtttctacgcgacccgtgatattaccgcaaccgtggactccatcccgctgatcactgcctcgatcctggcgaagaaactggcggaaggtctggacgcgctggtgatggacgtgaaagtgggtagcggcgcgtttatgccgacctacgaactctctgaagcccttgccgaagcgattgttggcgtggctaacggcgcaggcgtgcgcaccaccgcactgctcaccgacatgaatcaggtgctggcctccagtgccggtaacgcggttgaagtacgtgaagcggtgcagttcctgacgggtgaatatcgtaacccgcgtctgtttgatgtcacgatggcgctgtgtgtggagatgcttatctccggcaaactggcgaaagatgacgccgaagcgcgcgcgaaattgcaggcggtgctggacaacggtaaagcggcagaagtctttggtcgtatggtagcggcacaaaaaggcccgaccgacttcgttgagaactacgcgaagtatctgccgacagcgatgctgacgaaagcagtctatgctgataccgaaggttttgtcagtgaaatggatacccgcgcgctggggatggcagtggttgcaatgggcggcggacgccgtcaggcatctgacaccatcgattacagcgtcggctttactgatatggcacgtctgggcgaccaggtagacggccagcgtccgctggcggttatccacgcgaaagacgaaaacagctggcaggaagcggcgaaagcggtgaaagcggcaattaaacttgccgataaagcaccggaaagcacaccaactgtctatcgccgtatcagcgaataacggtatactgatctgatcatttaaatttgaagcactgagtacggagaacatatgaaacgtgcatttattatggtgctggactcattcggcatcggcgctacagaagatgcagaacgctttggtgacgtcggggctgacaccctgggtcatatcgcagaagcttgtgccaaaggcgaagctgataacggtcgtaaaggcccgctcaatctgccaaatctgacccgtctggggctggcgaaagcacacgaaggttctaccggtttcattccggcgggaatggacggcaacgctgaagttatcggcgcgtacgcatgggcgcacgaaatgtcatccggtaaagataccccgtctggtcactgggaaattgccggtgtcccggttctgtttgagtggggatatttctccgatcacgaaaacagcttcccgcaagagctgctggataaactggtcgaacgcgctaatctgccgggttacctcggtaactgccactcttccggtacggtcattctggatcaactgggcgaagagcacatgaaaaccggcaagccgattttctatacctccgctgactccgtgttccagattgcctgccatgaagaaactttcggtctggataaactctacgaactgtgcgaaatcgcccgtgaagagctgaccaacggcggctacaatatcggtcgtgttatcgctcgtccgtttatcggcgacaaagccggtaacttccagcgtaccggtaaccgtcacgacctggctgttgagccgccagcaccgaccgtgctgcagaaactggttgatgaaaaacacggccaggtggtttcggtcggtaaaattgcagacatctacgccaactgcggtatcaccaaaaaagtgaaagcgactggcctggacgcgctgtttgacgccaccatcaaagagatgaaagaagcgggtgataacaccatcgtcttcaccaacttcgttgacttcgactcttcctggggccaccgtcgcgacgtcgccggttatgctgcgggtctggaactgttcgaccgccgtctgccggagctgatgtctctgctgcgcgatgacgacatcctgatcctcaccgctgaccacggctgtgatccgacctggaccggtactgaccacacgcgtgaacacattccggtactggtttacggcccgaaagtaaaaccgggctcactgggtcaccgtgaaaccttcgcggatatcggccagactctggcaaaatattttggtacttctgatatggaatatggcaaagccatgttctgatggatttgggcggagcgttgactccgcctttgttatgtcacaaaaaggataaaacaatggctaccccacacattaatgcagaaatgggcgatttcgctgacgtagttttgatgccaggcgacccgctgcgtgcgaagtatattgctgaaactttccttgaagatgcccgtgaagtgaacaacgttcgcggtatgctgggcttcaccggtacttacaaaggccgcaaaatttccgtaatgggtcacggtatgggtatcccgtcctgctccatctacaccaaagaactgatcaccgatttcggcgtgaagaaaattatccgcgtgggttcctgtggcgcagttctgccgcacgtaaaactgcgcgacgtcgttatcggtatgggtgcctgcaccgattccaaagttaaccgcatccgttttaaagaccatgactttgccgctatcgctgacttcgacatggtgcgtaacgcagtagatgcagctaaagcactgggcattgatgctcgcgttggtaacctgttctccgctgacctgttctactctccggacggcgaaatgttcgacgtgatggaaaaatacggcattctcggcgtggaaatggaagcggctggtatctacggcgtggctgcagagtttggcgcgaaagccctgaccatctgcaccgtgtctgaccacatccgcactcacgagcaaaccactgccgctgagcgtcagaccaccttcaacgacatgatcaaaatcgcactggaatccgttctgctgggcgataaagantaattgtgtttcgctgaaaggcgattgtcgtgttaagccggagtgggggactgctccggctttttagtatctattcatcaatagcaactgatttatagatttactattatttttcatatggatagaaaataaaatccattcaagtatctattcacgaatctattcatttatgttcagccgtcatccaggaagggcatatcagcaactctggtggacaaccataaatttctgccattttgcttttgatgtttgagctaagccgttccgtcttttcgatctgttttagagaattaatcgagatacctaacattttacttacttcagcaagcgataatttatgcctgatacgcacggcggctagccaggaaatacgctggctgaacattaaattgataatctcccgttcctggttttccagatcgatcatatttccttccttggatattttaatcagcgagttaccttaccgcccccgctatccacgtcgacaactcccgtagctctttttcctggtccgggaagtcaaccaacagcgcttcgcactcttgttgcagcatatccgcgcggtacaggcagccttgcagtcgcccgg

SEQ ID NO: 1691 - DNA, 10666 bp, Escherichia coli
  Strain O55:H7
  modified_base (88)..(88): a, c, g or t
  modified_base (2229)..(2229): a, c, g or t
  modified_base (2335)..(2335): a, c, g or t
  modified_base (2616)..(2616): a, c, g or t
  modified_base (2729)..(2729): a, c, g or t
  modified_base (5839)..(5841): a, c, g or t
  modified_base (10601)..(10601): a, c, g or t
  modified_base (10654)..(10654): a, c, g or t
  modified_base (10660)..(10660): a, c, g or t
ttccagcggcgcggggttgaggctgtcggtaaacacctgggcgcgggtgatatggcctttttcaacgtcgaaatgcagttccacgccnccccagctaaagcgttcatccagcagatgcgagaatgccggagcctgaccgaagttccactcccagctactctggcgggcaaaggtttcggcgaagtttggcaagtctggcgttttgtccggggagatgatttccgcttccacgcgctcgccataatgggcgaaaaaggcctcggttatggcctcgcaaacctgctcatgggggatccccggcagcagctcggtgaggttggtcacgcgggaacgcactgaagtaatgcctttcgccgccagtttctttttatccggattgagatagtttgccaggcggctaaggtcggcattgagcagcaaggtgccgtggtggaagccacgatctttggtttcgcgataggccgatcctgagactttgcggtcgccttcggcggttttcaccaccagatcgttacgtccggacgcttcggcactgacgccgagcgcattcagtgcattgagcacaatcgacgtggagatggttttatcgtactccggcttgccagccataaaggtaaagcaggtattgccgagatcgtggaacaccgcgccgccaccgctactgcgccgcgccaggcggacgttatcttcttccatccgccgggtattacactctttccacgggttctgcgcgcgaccaattactaccgtgtcggcattgcgccagagaaacagaacgcgctgcgtggcgggcatttggcgaaaaatacactcttccaccgccaggttaaaccacgggtcgtaagagtcagagatgagcaggcgtaatgtggacataacgatttcctttcttgtagtaatgggtcactcttttttctcgctttcttcctcttccggcaccggtttgctggcggttaacaggaagggcgattgctgccagcgggtgcgtttaccctgtagcagcgtgcgggtcagcactacgccgattgccagtgagagcagcaacatcaggcgtaaaatgttagtggtgttatccacctgttgggcttcggtggcgagcgtatgggtgtcgagtgtcaggcgcagatagccgagcggtccgtttttcccggcaattggctcgacaatctgctggttaaaatagccgcctgcttttttaccgtcgagcgccagccgatcgcgcacttcgacgctttcgccagaacgtgcgataagatcgccttgttcgtcatacacacccgcgtcgaggatacggctttcatccgttaactgatcgaggatcgcctgaatgcgtttttcatccggtgagtcggtacgcatcagcggtgcaacgttcagcgtcacctgacgcgccagggtgcgggccagttcttccagctgtggattacgctgtcgctggtggttttgactaaaccatgacgccccctgcatcagtgccactaacaaggcaagacagaacaggacaatcactgcccgatgcagccggaatttcagttttgtgcgagccatcttccaccctttgaaaatttgagacttaatgttgccagaagcaatggatacaaggtagcctcatgcgttattttccctgcttcgaacgattttacaggagccttaatgcctaacattacctggtgcgacctgcctgaagatgtctctttatggccgggtctgcctctttcattaagtggtgatgaagtgatgccactggattaccacgcaggtcgtagcggctggctgctgtatggtcgtgggctggataaacagcgtctgacccaataccagagcaaactgggtgcggcgatggtgattgttgccgcctggtgcgtggaagattatcaggtgattcgtctggcaggttcactcaccgcacgggctacacgcctggcccacgaagcgcagctggatgtcgcgccgctgggaaaaatcccgcacctgcgcacgccgggtttgctggtgatggacatggattccaccgccatccagattgaatgtattgatgaaattgccaaactggccggaacgggcgagatggtggcggaagtaaccgaacgggcgatgcgcggcgaactcgattttaccgccagcctgcgcagccgcgtggcgacgctgaaaggcgctgacgccaatattctgcaacaggtgcgtgaaaatctgccgctgatgccaggcttaacgcaactggtgctcaanctggaaacgctgggctggaaagtggcgattgcctccggcggctttactttctttgctgaatacctgcgcgacaagctgcgcctgacagccgtggtagccaatgaantggagatcatggacggtaaatttaccggcaatgtgatcggcgacatcgtagacgcgcagtacaaagcgaaaactctgactcgcctcgcgcaggagtatgaaatcccgctggcgcagaccgtggcgattggcgatggagccaatgacctgccgatgatcaaagcggcagggctggggattgcctaccatgccaagccaaaagtgaatgaaaaggcggaagtcaccatccgtcacgctgacctgatgggggtattctgcatcctctcaggcagcctgaatcanaagtaattgctcgcccgccatcctgcgggcggcacagcattaacgaggtacaccgtggcaaaagctccaaaacgcgcctttgtttgtaatgaatgcggggccgattatccgcnctggcaggggcagtgcagtgcctgtcatgcctggaacaccatcaccgaggtgcgtcttgctgcgtcgcctacggtggcgcgtaacgagcgtctcagcggctatgccggtagcgccggggtggcaaaagtccagaaactctccgatatcagccttgaagagctgccgcgtttttccaccggatttaaagagttcgaccgcgtactaggcggcggcgtggtgccaggaagtgccattctgattggcggtaaccctggtgcggggaaatccacgctgctactgcaaacgctgtgcaaactggcccagcagatgaaaacgctgtatgtcaccggcgaagagtcgctgcaacaggtggcaatgcgcgctcatcgccttggcctgccgactgacaatctcaatatgttgtcggaaaccagcatcgaacagatctgcctgattgccgaagaagagcaaccgaagctgatggtaattgactcgatccaggtgatgcatatggcggatgtacagtcatcgcctggtagcgtggcgcaggtgcgtgaaacggcggcttatttgacacgcttcgccaaaacgcgcggtgtggcgattgtcatggtggggcacgtaaccaaagatggttcgctggctggcccgaaagtgctggaacactgtatcgactgttcggtgcttttggatggcgatgccgactcccgttttcgcaccttgcgcagccataaaaaccgcttcggcgcggtgaatgagctgggcgtcttcgcgatgaccgaacaggggctgcgtgaagtcagcaacccttcggcaattttcttaagtcgcggagatgaagtgacctccggcagctccgtgatggtggtgtgggaaggaacgcgtccgttgctggtggagattcaggcgctggtcgatcactcgatgatggcgaatccgcgccgcgtggcagtggggctggaacaaaaccgtctggcaatcctgctggctgtcttgcaccgtcacggtggtctgcaaatggccgatcaggatgtgtttgtgaacgtggtcggcggcgtaaaggtaaccgaaaccagcgccgacttagcgttactgctggcgatggtttccagcctgcgtgacagaccgctaccgcaggatctggtggtgtttggtgaagtcgggctggcaggggagatccgcccggtgcccagcggtcaggaacgaatctctgaagcggcgaaacacggttttcgccgggcgattgttccggcggctaacgtaccgaaaaaagcgccggaagggatgcagatttttggcgttaaaaaactctccgacgcgcttagcgtgttcgacgacttataatgagaaatacggagggagatatgtcgtcatttgattacctgaaaactgccatcaagcaacagggctgcacgctacagcaggtagctgatgccagcggtatgaccaaagggtatttaagccagttactgaatgccaaaatcaaaagccccagcgcgcaaaagctggaggcgttgcaccgttttttggggcttgagtttccccggcagaagaaaacgatcggtgtcgtattcggtaagttctacccactgcataccggacatatctaccttatccagcgcgcctgtagccaggttgacgagctgcatatcattatgggttttgacgatacccgtgaccgcgcgttgttcgaagacagtgccatgtcgcagcagccgaccgtgccggatcgtctgcgctggttattgcaaacttttaaatatcagaaaaatattcgcattcatgctttcaacgaagagggcatggagccgtatccgcacggctgggatgtgtggagcaacggtatcaaaaagtttatggctgaaaaggggatccagccggatctgatctacacctcggaagaagccgatgcgccacagtatatggaacatctggggatcgagacggtgctggtcgatccgaaacgtacctttatgagtatcagcggtgcgcagatccgcgaaaacccgttccgctactgggaatatattcctaccgaagtgaagccgttttttgtgcgtaccgtggcgatccttggcggcgagtcgagcggtaaatccaccctggtaaacaaacttgccaatatcttcaacaccaccagtgcgtgggaatatggccgcgattatgtcttttcacacctcggcggtgatgagatcgcattgcagtattctgactacgataaaatcgcgctgggccacgctcaatacattgattttgcggtgaaatatgccaataaagtggcatttatcgataccgattttgtcaccactcaggcgttctgcaaaaagtacgaagggcgggaacatccgttcgtgcaggcgctgattgatgaataccgtttcgatctggtgatcctgctggagaacaacacgccgtgggtggcggatggtttacgcagcctcggcagttcggtggatcgtaaagagttccagaatctgctggtggagatgctggaagagaacaatatcgaatttgtgcgggttgaagaggaagattacgacagccgtttcctgcgctgcgtggagctggtgcgggagatgatgggggagcagagataaccgtgatgaaactgctcaaaggcgaggtataaaatgagtttttttgatgagttgaaaacctctctggaagaggctgtcgagattaaacaaggtttgaaaaaacctgcacgggtggcccgccacgaaattgaggatgctaaggctgttgtagaccggaaaaggtgttcacgccgcatccggcattcggtgctcaatgcctgatgcgacgcttaccgcgtcttatcaggcctacagttttacaacgtattgaaattgctggttttgtaggccggataaggcgttcgcgccgcatccggcattttacgcattacttcgcaatacgcttgtacttgatacgcttcggctccagcgcgtctgcgcccagcgtgcgtttcttgtactcttcgtactcggtaaagttaccttcgaagaactcaactttaccttcatcctggtaatccagaatgtgcgtggcgatacggtcgaggaaccaacggtcgtgcgagataaccatcgcacagcccgggaactccagcagggcgttttccagcgcnnncagggtttcgatatccaggtcgttggttggttcgtcgagcagcagcatgttgccgccaacctgcagcagcttcgccagatgcagacgaccgcgctcaccaccggagagttcaccaacgcgtttaccctgatcaacccctttaaagttaaagcggccaacgtaggcgcggcttggcatctcggtgttgccgatcttcatgatatccagcccgccggaaacttcttcccaaacggttttgctgttatccattgagtcacggaactgatcaaccgacgccagtttcaccgtttcacccaaagtgatggtgccgctgtccggctgttcctgaccagagatcatacggaacagggtcgatttacccgcaccgttcggaccgatgatcccgacgatcgctcctttcgggatcgagaagctcaggtcatcaatcagcagacgatcgccataggatttacgcaggttgctgacttccagcactttatcgcccagacgcggtccaggtggaataaacagttcgttggtttcgttacgtttctgatattcggtgctgttcagttcttcaaagcgtgccagacgtgctttacctttcgactggcggcctttagttccctgacgtacccactccagctctttctcgatcgacttacgacgcgccgcttcttgtgaagcttcctgcgccagacgctgatctttctgctccagccaggaggagtagttaccttcccacggaataccttcaccgcggtcaagttcgaggatccagcccgcaacgttatcgaggaagtaacggtcgtgggtaatcgccaccacggtgccttcgaagtcgtgcaggaagcgttccagccaggccacggattcggcatccaggtggttggtcggttcgtcgagcagcagcatgtctggtttttccagcagcaggcggcacaacgccacgcgacgacgctcaccaccggagaggttagcgattttcgcgtcccagtccggcagacgtagcgcatccgccgcacgctccagctgtacgttcagattatgaccgtcgtgagcctgaatgatctcttccagacggccttgttcagcggccagcttgtcaaaatcggcatccggatcggcgtacagcgcatacacttcatccaggcgtttcagggcgttaaccacttctgaaaccgcttcttcaatggactcacgtacggtgtgttccgggttcagctgcggttcctgcggcagataaccaatcttgatgtctggctgcggacgcgcttcaccttcgatgtctttatcaatgcccgccataatgcgcagcagggtggacttacccgcgccgttcagacccaggacaccaatttttgccccagggaagaaactcagagagatgtttttcaaaatatgacgtttcggcggaacaactttgccgacacgatgcatggtataaacgaattgagccacgttggacttcgcctctatgtttatcgtgatgatgagttttcaaaggcgaagtgtagcctttttccccgcctaatcccagccggtcgatcaccctcgcagtaaaagtaaaaaagtgtccgtaacgtggcgtaaacggcaatgactggttagcataaatctattacgcggcatgacgctgcattgatgtatttacacttagaggatgcgcttgtggaaaaagccaaacaagttacctggcggctgttggctgccggtgtctgtctgctgacggtcagcagcgtggcgcgagccgactcactggatgagcagcgtagtcgttacgcgcaaatcaagcaggcctgggataatcgacaaatggatgtggtcgaacaaatgatgcctggactgaaggattatccgctttatccctacctggaataccgccagatcaccgatgacctgatgaatcaaccggcggtgacggtcactaactttgttcgcgctaaccccacgcttcctcccgctcgcacgctgcaatctcgtttcgtcaatgaactggcgcggcgtgaagactggcgtggcctgttagcctttagcccggaaaagcccggaactaccgaagcacaatgtaattactactatgcgaaatggaacaccgggcagagtgaagaagcctggcaaggggcgaaagagctgtggctaaccggcaagagccagcctaacgcctgtgacaagttatttagcgtctggcgtgcgtcaggtaaacaagatccgctggcgtatttagagcgtatccgtctggcgatgaaagcgggtaacactggcctggtaacagtgctggcagggcagatgcctgccgattaccagactatcgcctcggcaatcatttcactggcgaacaaccccaatacggtactgaccttcgcgcgtacaaccggagcgaccgattttacccgtcaaatggcggcggtggcgtttgccagtgtggcgcggcaggatgctgaaaatgcacggctgatgatcccatcgcttgcccaggcgcagcagcttaatgaagatcagattcaggagctgcgcgatatcgtcgcctggcgtttgatgggcaacgatgtcaccgacgagcaggcgaaatggcgcgatgacgccattatgcgctcgcaatctacttcgcttattgaacgccgtgtgcgaatggcgcttggcactggcgatcgtcgcggcctgaatacctggctggcgcgtctgcctatggaagcgaaagagaaagatgaatggcgttactggcaggcggatttattgctggaacgcggacgtgaagctgaagcaaaagagattttgcatcaactcatgcaacagcgtggtttctacccgatggttgctgcacaacgcatcggcgaagagtatgagctgaagattgataaagcgccgcagaatgttgacagcgccctgactcaggggccggagatggcgcgcgtgcgcgagttgatgtactggaatctcgataacaccgcgcgtagcgagtgggccaatctggtgaagagcaagtcaaaaacagagcaggctcaactggcgcggtatgctttcaacaaccaatggtgggatcttagcgttcaggcaacgatcgccgggaagctttgggatcatctggaagagcgattcccgctggcttacaacgatcttttcaaacgttacaccagtgggaaggagatcccgcaaagctatgcgatggcgattgcccgtcaggagagcgcctggaatccgaaagtgaaatcaccggtaggggccagcggcctgatgcagattatgccgggcacggcgacccatacggtgaagatgttctctattcctggttatagcagccctgggcaattgctggatccggaaacgaatatcaacattggcaccagttacctgcaatatgtttatcagcaatttggtaataaccgtattttctcctcagcagcttataacgccggacctggacgggtgcgaacctggcttggcaacagcgccgggcgtatcgacgctgtggcatttgtcgagagtattccgttctccgagacgcgcggttatgtgaagaacgtgctggcttatgacgcttactaccgctatttcatgggggataaaccgacgttgatgagcgccacggaatggggacgtcgttactgatccgcacgtttatgatatgctatcgtactctttagcgagtacaaccgggggaggcattttgcttcccccgctaacaatggcgacatattatggcccaacaatcaccctattcagcagcgatggcagaacagcgtcaccaggagtggttacgttttgtcgacctgcttaagaatgcctaccaaaacgatctccatttaccgttgttaaacctgatgctgacgccagatgagcgcgaagcgttggggactcgcgtgcgtattgtcgaagagctgttgcgcggcgaaatgagccagcgtgagttaaaaaatgaactcggcgcaggcatcgcgacgattacgcgtggatctaacagcctgaaagccgcgcccgtggagctgcgccagtggctggaagaggtgttgctgaaaagcgattgattttgtaggcctgataagacgtggcgcatcaggcatcgtgcaccgaatgccggatgcggcgtgaacgccttatccgtcctacaaatacccgtaatttcaatatgtttggtaggcatgataagacgcggcagcgtcgcatcaggcgcttaatacaccgcattatgaaacggactcagcgccaggatcaccgcctggtgatagacgctggcgcgagtgagtttcccggcggtaaacacgccgatcgccccttccttacgaccaatctcatcaataccggtataacgcgacatcacgggaccaagcgcctcaccttcacgtactttttccaatatcaccgcaggcaacggcaaagttgccgaacgcgcctcgccgcgctgggtggtgttttcaatcaccacccaactgaaagtgctgtcgccatcaatgccagcttcaatcgccacccaaaaatcagcctctggaagtaaacggcgggcattggctacccggtttcgtgcgccagcgcgcgtttcctcactgccaaagggctgttccggtacaccgctctcgacggcaatggatgcaatatggcaggatccttcgccgaagatctcgtgaaatgcctgcagaatggcctgaattttagcgggattggtggtcgcacagacaacttggtgcataatcagcattactcagaaaattaacgttacagcagtatacggaaaaaaagcatgttacaggtatacctagtccgccacggtgaaacgcagtggaacnccgagcgacgtattcagggccagtctgacagcccgctgaccgccaaaggtgancaacangcgatg

SEQ ID NO: 1692 - DNA, 5645 bp, Escherichia coli
  Strain O55:H7
  modified_base (2440)..(2443): a, c, g or t
  modified_base (3317)..(3317): a, c, g or t
  modified_base (3384)..(3384): a, c, g or t
  modified_base (4286)..(4286): a, c, g or t
  modified_base (4484)..(4484): a, c, g or t
ggcgacgcgtgccaaagagcttggcattacgcatatcatcagtagcgatttaggacgcacccggcgtacggcggaaatcatcgcccaggcctgcggctgtgacatcatctttgattctcgcctgcgtgaattaaacatgggtgtgctggaaaaaagacatatcgattctctgaccgaagaagaagagaactggcgtcggcagctggtcaatggcaccgttgatgggcgtattcctgaaggcgagtcaatgcaggagctcagcgatcgcgtcaatgcggcactggaatcttgccgggacttaccgcagggaagccgaccgctgctggtgagccatggtattgcactgggatgtctggtgagtacgattctcggattaccagcatgggcagagcgccgcttacgtctgcgtaactgttctatttcgcgcgtggattatcaggaaagcctgtggctggcgtctggctgggtcgttgaaaccgcaggggacatctcgcatctggacgcccctgcattagatgagctgcagcgttaacggcggataggaatcagcagttcacagcgcagattaattgggcgatctcccgctttggcgtcttctgccgggtagtatcgctcaatatcctgacctttacggcgcgtcaggttgagcattggcatgcacgttccgtataccgtcaggataaactcctgcacgccggttcccagaccttcataggtaaacatcacatattcgccgccctgcagcatcaccggatgccccgtcagtacatagccatctgcctgatcctgggctaacgcggtggtatagaatacctcttgttcgtcgtctttatcctgactcggacgcgtttcattcaggccgtagagcactggcggaatggtcggcgcgttgccgagaaaatcgtgccagaactgataacgcatttcatggcggaaatcagagatttgctccagcgaacaggagtagctctgggtaacaccaatcagcggcgtatcttccagggtgacaaatttatgctctggcatagtgaattcacccagacgcagcggcgggcgaataccaaaggcgctccattcaggagaacggcggtaaagtgcaggagtctgggcaaactgcttcttgaatgcgcgggtaaatgtctgttgagagtcgaagcggtattgcagcgcgatgtccagaatcggacgcgcagtcaggcgtagtgcgaccgccgatttcgacaaacgacgagcacgaatatacgcgccaatagcatggccagtgacatctttaaacattctctgtaagtgccacttggaataacctgctttcgccgctacattgtcgagcgacaggggctgatccagatgaccttccagccagattaaaaggtcgcgaataatgccggcctgatccataaaatatcctcatcctttcaacaacgagcacctgacatcaggtaattggataatagcattttttgctgttttagcattcagtgtttttttcttagtagagtatgttttaggtcttgacggaaataaaagtattgagattttgttcttaatcaatatgttatttaccgtgacgaactaattgctcgtgtaatagataaaaatggtaacaatatgaaatacaagcatttgatcctgtctttaagcctgataatgctggggccattggctcatgcagaagagattggttcggtcgacaccgtatttaaaatgatcggcccggatcacaaaattgttgtggaagcctttgacgatcccgatgtgaaaaatgtcacctgttatgtgagccgggcgaaaacaggtggtattaaagggggattgggtctggcggaagatacctccgatgcggctatttcttgtcagcaagtcgggccgattgaactgtcggatcgtattaaaaacggcaaagctcagggcgaggtagtattcaaaaaacgcacgtccctggtctttaagtcgttacaggtcgtgcgcttttatgacgccaaacgcaacgcgctcgcttatctggcttactccgacaaagttgtagaaggttcgccgaaaaacgcgattagcgcggttcctgtcatgccgtggcgacaataacagaggcgatttatgcaacgggaaacggtctggttagtggaagatgagcaagggatagccgacacgctggtctacatgttgcagcaggaaggttttgccgtcgaggtctttgagcgaggcttgccggtgctggataaagctcgccagcaggttcccgatgtcatgattctcgacgttggtttgcctgatatcagtggctttgaattgtgccgccagttactggcgctccatccggcgttacctgtactgttcctgacggcccgaagtgaagaggtcgatcgcctgcttgggctggaaattggcgctgacgactatgtggctaaaccgttttcaccccgcgaagtgtgcgccagggtgnnnnccttgctgcgtcgggtgaagaagttctcgacgccgtctcccgtcatccgtattggtcattttgaattgaatgaacccgcggcgcagatcagctggtttgacacgccattaacgctgacgcggtatgagtttttattgctgaagacgttactcaagtcgccaggccgcgtctggtcccgccagcaactgatggatatcgtgtgggaagatgcgcaggacacctacgatcgcaccgtctatacccacattaaaacgctgcgtgccaagctgcgcgccatcaaccccgatctttcaccgattaatactcatcgcggcatgggatacagcctgaggagcctgtaatgcgtatcggcatgcggttgttgctgggctattttttactggtggcggtggcggcctggttcgtactggctatttttgtcaaagaagttaaaccgggcgtgcgaagagcaacggaggggacgctgatcgacaccgcaacgttgctggcggagctggcgcgtcccgatttgctctctggggacccaacgcatgggcaactggcgcaggcgtttaatcagctacaacatcgcccgtttcgcgctaatatcggtggcattaacaaagtgcgcaatgaatatcatgtctatatgaccgatgcgcagggcaaagtattgttcgattcggcaaataaagccgttgggcaggattattcgcgctggaatgacgtctggctaacgttgcgtggtcagtatggtgcgcgcagcacgttgcaaaatcctgccgatcccgaaagttcggtgatgtatgttgccgcgccgattatggacggctcgcggcttattggcgttttgagcgtaggcaaaccgaacgcggcgatggctccggtcattaancgcagcgagcggcgaattttatgggccagcgccattttgctggggattgcactggtgattggcgcangcatggtttggtggatcaaccgctccattgcccggctcactcgctatgccgattccgtcactgacaataagcccgttcctcttcctgaactcggcagtagcgagttgcgtaagcttgcgcaggcgctggaaagtatgcgcgtgaagctggaagggaaaaactatattgagcagtatgtttatgcgttaacccatgagctaaaaagcccactggcggcgattcgtggcgcggcggaaattttacgcgaaggtccgccaccggaagtggtggctcgttttaccgacaacattctgacgcaaaatgcgcgtatgcaggcattggtagaaacgttactacgccaggcaagactggagaatcgtcaggaagtcgttctgactgctgttgatgtggcggcattatttcgccgcgtcagcgaagcgcgcaccgtgcagttggcagaaaaaaacatcactttgcatgttatgcctactgaggttaacgttgctgctgaaccggcgttactggagcaggcgctggggaatttactggataacgccatcgattttacccccaagagcggtcgcataacgctaagcgccgaagtggatcaggaacacgtcgcccttaaggtgctggataccggtagtggtattcctgactacgcgctgtcacgtatttttgaacgcttttactctttgccgcgtgcaaatgggcaaaaaagcagcggtctggggttggcgtttgtcagtgaggtcgcccgtttgtttaacggcgaagtcacgctgcgcaacgtgcaggaaggtggcgtgctggcctcgcttcggcttcaccgtcacttcacatagcttcaaattcttcccacatagccttcgtatcctgctgccattgcaaaggagaagactatgttgaaatcccccctgttntggaaaatgaccaccctgtttggtgcagtattgctgttgttgattccgataatgctgattcggcaggtgattgtcgaacgtgccgattaccgtagcgatgtggaagatgcgattcgccaaagtaccagcgggccgcaaaaactcgttgggcctcttatcgctattcctgtgaccgagctttatacggtgcaggaagangataaaaccgtggagcggaaacgaagttttatccatttttggttacctgagtcattgatggttgatggcaatcagaacgtggaagaacgcaagatagggatttataccggtcaggtctggcacagtgatttaacgctaaaagccgatttcgatgtttcgcgtcttagcgaactcgacgcgccaaatatcacctttggcaagccatttattgtgattagcgtcggggatgcgcgtggtattggtgtggtgaaagcgcctgaagttaacggaacggcgctgactattgaacccggcatcgggttagagcaaggcgggcagggcgtgcatatccctttacccgaaggggactggcggaagcagaacctgaagctgaatatggcactgaatttaagcggtaccggcgatctttctgtggtgcctgcggggcgtaatagcgaaatgaccttaaccagcaactggccgcatcccagttttttaggtgattttctaccagccaaacgggaagttagtgagtcaggttttcaggcgcaatggcaaagcagctggtttgctaataatctcggtgagcgttttgcttcaggcaatgataccggctgggaaaacttccccgcgtttagcgtcgcagtgacgacgcccgccgatcaataccaattaactgaccgggcgactaagtatgccattctgctgattgcgctgacttttatggcgttctttgtttttgaaacgctcaccgcgcaacgtttacacccaatgcaatatttgctggtggggctttcattggtgatgttttatttgctcttgctggcgctttctgaacataccggttttaccgtggcatggataatcgccagtctgattggggcgttaatgaacggtatttatttgcaggcggtattgaaaggttggcgcaacagcatgttgtttaccctcgcgctgttgttgctggatggtgtgatgtggggactcctcaactctgccgatagcgcgctgttgttgggaaccagtgtgctggtggtggcgctggccggcatgatgtttgtgactcgtaatatcgactggtatgcgttttcactgccgaaaatgaaagccagtaaagaagttacaacggacgatgaattacgtatctggaaataaggttgaaaaataaaaacggcgctaaaa

SEQ ID NO: 1693 - DNA, 1162 bp, Escherichia coli
  Strain O55:H7
  modified_base (1099)..(1100): a, c, g or t
  modified_base (1102)..(1105): a, c, g or t
  modified_base (1117)..(1118): a, c, g or t
ttttttgacggtggtaaagccgattaatcttccagatcaccgcagaagcgataaccttcaccgtgaatggtggcgatgatttccggcgtatccggcgtagattcgaaatgtttacgaatacggcggatcgtcacgtctacagtacggtcgtgcggtttcagctcacggccggtcattttcttcagcagttcagcacgggactgaattttgcctgggttttcacagaagtgaagcatggcgcggaactcactgcgcggcagcttgtactgctcgccatcagggccgatcaaagaacggctgttgatgtccagttcccaaccattgaacttgtagctttcaacgctacgacgttcttcgctgacagtacccagattcatggtacgggacagcaggttgcgtgcacgaatcgtcagttcacgcgggttgaacggtttggtgatgtagtcatctgcaccgatttcgaggccgagaattttatcgacttcgttgtcacggccagtcaggaacatcaacgcaacattcgcctgctcgcgcagttcacgcgctaacagaagaccgttcttacccggcagattgatatccatgatcaccaggttgatgtcatattcagagaggatctgatgcatttccgcgccatctgtcgcttcgaaaacatcatagccttccgcttcgaaaatacttttcaacgtgttgcgtgttaccaactcgtcttcaacgataagaatgtgcggggtctgcatgtttgctacctaaattgccaactaaatcgaaacaggaagtacaaaagtccctgacctgcctgatgcatgctgcaaattaacatgatcggcgtaacatgactaaagtacgtaattgcgttcttgatgcactttccatcaacgtcaacaacatcattagcttggtcgtgggtactttccctcaggacccgacagtgtcaaaaacggctgtcatcctaaccattttaacagcaacataacaggctaagaggggccggacacccaataaaactacgcttcgttgacatatatcaagttcaattgtagcacgttaacagtttgatgaaatcatcgtatctaaatgctagctttcgtcacattanntnnnnaatccaactagnngcatcatacaactaataaacgtggtgaatccaattgtcgagatt

SEQ ID NO: 1694 - DNA, 911 bp, Escherichia coli
  Strain O55:H7
  modified_base (130)..(133): a, c, g or t
  modified_base (139)..(139): a, c, g or t
  modified_base (377)..(380): a, c, g or t
  modified_base (444)..(445): a, c, g or t
  modified_base (893)..(893): a, c, g or t
  modified_base (909)..(911): a, c, g or t
aattatcctaagtaaacagaaggatatgtagcattttttaacaattaaaccgttagtacagtcaggaaatagtttagccttttttaagctaagtaaagggctttttctgcgacttacgttaagaatttgnnnnttcgcnccgcgtaataagttgacagtgatcaccctgttcgcggtcatttggtcaagaagagtggcaatatgcgtataacgattattctggtcgcacccgccagagcagaaaatattggggcagcggcgcgggcaatgaaaacgatggggtttagcgaactgcggattgtcgatagtcaggcacacctggagccagccacccgctgggtcgcacatggatctggtgatattattgataatattannnntttcccgacactggctgaatcgttacacgatgtcgatttcactgtcgccaccactgcgcgcagnngggcgaaatatcattactacgctacgccagtagaactggtgccgctgttagaggaaaaatcttcatggatgagccatgccgcgctggtgtttggtcgcgaagattccgggctgactaacgaagagttagcgttggctgacgttcttactggtgtgccgatggtggcggattatccttcgctcaatctggggcaggcggtgatggtctattgctatcaattagcaacattaatacaacaaccgacgaaaagtgacacaacggcagaccaacatcaactgcaagctttacgcgaacgagccatggcattgctgacgactctggcagtggcagatgacataaaactggtcgactggttacaacaacgcctggggcttttagagcaacgagacacggcaatgttgcaccgtttgctgcatgatattgaaaaaaatatcaccaaataaaaaangccttagtaagtattnnn
